United States Patent Application Publication US 2012/0094332 A1 - sequence listing, part 4

SEQ ID NO: 3182 - DNA, 2605 bp, Artificial Sequence
  Description of Artificial Sequence: Synthetic DNA sequence of Thermus Rt41A DNA Polymerase A692V
atgaaatacctgctgccgaccgctgctgctggtctgctgctcctcgctgcccagccggcgatggccatggatatcggaattaattcggatccgaattccccactttttgacctggaggaaccccccaagcgggtgcttctggtggacggccaccacctggcctaccgcaccttctacgccctgagcctcaccacctcccggggggagccggtgcagatggtctacggcttcgcccggagcctcctcaaggccttgaaggaggacgggcaggcggtggtcgtggtctttgacgccaaggccccctccttccgccacgaggcctacgaggcctacaaggcgggccgggcccccaccccggaggacttcccccgccagctcgccttggtcaagcggctggtggaccttctgggcctggtccgcctcgaggccccgggttacgaggcggacgacgtcctgggcaccctggccaagaaggccgaaagggaggggatggaggtgcgcatcctcacgggagaccgggacttcttccagctcctctccgagaaggtctcggtcctcctgccggacgggaccctggtcaccccaaaggacgtccaggagaagtacggggtgccgccggagcgctgggtggacttccgcgccctcacgggggaccgctcggacaacatccccggggtggcggggataggggagaagaccgcccttcgactcctcgcggagtgggggagcgtggagaacctcctgaagaacctggaccgggtgaagccggactcggtccggcgcaagatagaggcgcaccttgaggacctccgcctctccttggacctggcccgcatccgcaccgacctccccttggaggtggactttaaggccctgcgccgcaggacccccgacctggagggcctgagggcctttttggaggagctggagttcggaagcctccttcatgagttcggcctcctgggaggggagaagccccgggaggaggccccctggcccccgcccgaaggggccttcgtaggcttcctcctctcccgcaaggagcccatgtgggcggagcttctggccctggcggccgccgcagagggccgggtccaccgggcaacaagcccggttgaggccctggccgacctcaaggaggcccgggggttcctggccaaggacctggccgttttggccctgcgggagggggtggccctggaccccacggacgaccccctcctggtggcctacctcctggacccggccaacaccaaccccgagggggtggcccggcgctacgggggcgagttcacggaggacgcagcggagagggccctcctctccgagaggctcttccagaacctctttccccggctttccgagaagctcctctggctctaccaggaggtggagcggcccctctcccgggtcttggcccacatggaggcccggggggtgaggctggacgtcccccttctggaggccctctcctttgagctggagaaggagatggagcgcctggagggggaggtcttccgcttggccggccaccccttcaacctcaactcccgcgaccagctggaaagggtcctctttgacgagctgggccttaccccggtgggtcggacggagaagacgggcaagcgctccaccgcccagggggccctggaggccctccggggggcccaccccatcgtggagctcatcctccagtaccgggagctttccaagctcaaaagcacctacctggaccccctgccccggctcgtccacccgcggacgggccggcttcacacccgcttcaaccagacggccacggccacgggaaggctttccagctccgaccccaacctgcagaacatccccgtgcgcacccccttggggcagcgcatccgcaaggccttcgtggccgaggaggggtggctccttttggcggcggactactcccagatcgagcttcgggtcctggcccacctctcgggggacgagaacctgaagcgggtcttccgggaggggaaggacatccataccgaaaccgccgcctggatgttcggcttagaccccgctctagtggatccaaagatgcgccgggtcgccaagacggtcaacttcggcgtcctctacgggatgtccgcccacaggctctcccaggagctcggcatagactacaaggaggcggaggcctttattgagcgctacttccagagcttccccaaggtgcgggcctggatagaaaggaccctggaggagggccggacgcggggctacgtggagaccctgttcggcaggaggcgctatgtgcccgacctggcctcccgggtccgctcggtgcgggaggcggcggagcggatggccttcaacatgcccgtgcagggcaccgccgccgacctgatgaagatcgccatggtcaagctcttccccaggctaaagcccctgggggcccacctcctcctccaggtgcacgacgagctggtcctggaggtgcccgaggaccgggccgaggaggccaaggccctggtcaaggaggtcatggagaacacctaccccttggacgtgcccctcgaggtggaggtgggcgtgggtcgggactggctggaggcgaagggggattgaagcggtcgac

SEQ ID NO: 3183 - DNA, 3026 bp, Artificial Sequence
  Description of Artificial Sequence: Synthetic DNA sequence of Thermus aquaticus DNA Polymerase Wild Type
atgagggggatgctgcccctctttgagcccaagggccgggtcctcctggtggacggccaccacctggcctaccgcaccttccacgccctgaagggcctcaccaccagccggggggagccggtgcaggcggtctacggcttcgccaagagcctcctcaaggccctcaaggaggacggggacgcggtgatcgtggtctttgacgccaaggccccctccttccgccacgaggcctacggggggtacaaggcgggccgggcccccacgccggaggactttccccggcaactcgccctcatcaaggagctggtggacctcctggggctggcgcgcctcgaggtcccgggctacgaggcggacgacgtcctggccagcctggccaagaaggcggaaaaggagggctacgaggtccgcatcctcaccgccgacaaagacctttaccagctcctttccgaccgcatccacgccctccaccccgaggggtacctcatcaccccggcctggctttgggaaaagtacggcctgaggcccgaccagtgggccgactaccgggccctgaccggggacgagtccgacaaccttcccggggtcaagggcatcggggagaagacggcgaggaagcttctggaggagtgggggagcctggaagccctcctcaagaacctggaccggctgaagcccgccatccgggagaagatcctggcccacatggacgatctgaagctctcctgggacctggccaaggtgcgcaccgacctgcccctggaggtggacttcgccaaaaggcgggagcccgaccgggagaggcttagggcctttctggagaggcttgagtttggcagcctcctccacgagttcggccttctggaaagccccaaggccctggaggaggccccctggcccccgccggaaggggccttcgtgggctttgtgctttcccgcaaggagcccatgtgggccgatcttctggccctggccgccgccagggggggccgggtccaccgggcccccgagccttataaagccctcagggacctgaaggaggcgcgggggcttctcgccaaagacctgagcgttctggccctgagggaaggccttggcctcccgcccggcgacgaccccatgctcctcgcctacctcctggacccttccaacaccacccccgagggggtggcccggcgctacggcggggagtggacggaggaggcgggggagcgggccgccctttccgagaggctcttcgccaacctgtgggggaggcttgagggggaggagaggctcctttggctttaccgggaggtggagaggcccctttccgctgtcctggcccacatggaggccacgggggtgcgcctggacgtggcctatctcagggccttgtccctggaggtggccgaggagatcgcccgcctcgaggccgaggtcttccgcctggccggccaccccttcaacctcaactcccgggaccagctggaaagggtcctctttgacgagctagggcttcccgccatcggcaagacggagaagaccggcaagcgctccaccagcgccgccgtcctggaggccctccgcgaggcccaccccatcgtggagaagatcctgcagtaccgggagctcaccaagctgaagagcacctacattgaccccttgccggacctcatccaccccaggacgggccgcctccacacccgcttcaaccagacggccacggccacgggcaggctaagtagctccgatcccaacctccagaacatccccgtccgcaccccgcttgggcagaggatccgccgggccttcatcgccgaggaggggtggctattggtggccctggactatagccagatagagctcagggtgctggcccacctctccggcgacgagaacctgatccgggtcttccaggaggggcgggacatccacacggagaccgccagctggatgttcggcgtcccccgggaggccgtggaccccctgatgcgccgggcggccaagaccatcaacttcggggtcctctacggcatgtcggcccaccgcctctcccaggagctagccatcccttacgaggaggcccaggccttcattgagcgctactttcagagcttccccaaggtgcgggcctggattgagaagaccctggaggagggcaggaggcgggggtacgtggagaccctcttcggccgccgccgctacgtgccagacctagaggcccgggtgaagagcgtgcgggaggcggccgagcgcatggccttcaacatgcccgtccagggcaccgccgccgacctcatgaagctggctatggtgaagctcttccccaggctggaggaaatgggggccaggatgctccttcaggtccacgacgagctggtcctcgaggccccaaaagagagggcggaggccgtggcccggctggccaaggaggtcatggagggggtgtatcccctggccgtgcccctggaggtggaggtggggataggggaggactggctctccgccaaggagtgataccaccccatgctggcccaagccagcatgggggccccggcaaaaggtttctggggaagttaccaggcatggtgggccgaaggaaacaggaaacaagggtatgagggttttttgccctaaagaaaggccagggggtcctcccgaaggaaggcttccagggggataccccctgggcccaggagtagcccctttcctccaaaggcctgggtgaaggcttttagccctttggtcctttgggaaggggcgcttttgacctccaaagccagaaggcgccttcccttcttcaagacgaagtcaacctcctggtccctttcccgccagtagtacacctcaaagcccccgtgggggccgtgggccagaaggtgggcgcccacggcggtttccacgagccgccccatgagggcggcgtccgcccacacctcctttggggaaagccccaagaccgccgtgatgagccccgtattaagggccaggagcttggggctcgaggcgcggcgccggaagggctcggcggcgtacttctgcag

SEQ ID NO: 3184 - DNA, 3026 bp, Artificial Sequence
  Description of Artificial Sequence: Synthetic DNA sequence of Thermus aquaticus DNA Polymerase R728A
atgagggggatgctgcccctctttgagcccaagggccgggtcctcctggtggacggccaccacctggcctaccgcaccttccacgccctgaagggcctcaccaccagccggggggagccggtgcaggcggtctacggcttcgccaagagcctcctcaaggccctcaaggaggacggggacgcggtgatcgtggtctttgacgccaaggccccctccttccgccacgaggcctacggggggtacaaggcgggccgggcccccacgccggaggactttccccggcaactcgccctcatcaaggagctggtggacctcctggggctggcgcgcctcgaggtcccgggctacgaggcggacgacgtcctggccagcctggccaagaaggcggaaaaggagggctacgaggtccgcatcctcaccgccgacaaagacctttaccagctcctttccgaccgcatccacgccctccaccccgaggggtacctcatcaccccggcctggctttgggaaaagtacggcctgaggcccgaccagtgggccgactaccgggccctgaccggggacgagtccgacaaccttcccggggtcaagggcatcggggagaagacggcgaggaagcttctggaggagtgggggagcctggaagccctcctcaagaacctggaccggctgaagcccgccatccgggagaagatcctggcccacatggacgatctgaagctctcctgggacctggccaaggtgcgcaccgacctgcccctggaggtggacttcgccaaaaggcgggagcccgaccgggagaggcttagggcctttctggagaggcttgagtttggcagcctcctccacgagttcggccttctggaaagccccaaggccctggaggaggccccctggcccccgccggaaggggccttcgtgggctttgtgctttcccgcaaggagcccatgtgggccgatcttctggccctggccgccgccagggggggccgggtccaccgggcccccgagccttataaagccctcagggacctgaaggaggcgcgggggcttctcgccaaagacctgagcgttctggccctgagggaaggccttggcctcccgcccggcgacgaccccatgctcctcgcctacctcctggacccttccaacaccacccccgagggggtggcccggcgctacggcggggagtggacggaggaggcgggggagcgggccgccctttccgagaggctcttcgccaacctgtgggggaggcttgagggggaggagaggctcctttggctttaccgggaggtggagaggcccctttccgctgtcctggcccacatggaggccacgggggtgcgcctggacgtggcctatctcagggccttgtccctggaggtggccgaggagatcgcccgcctcgaggccgaggtcttccgcctggccggccaccccttcaacctcaactcccgggaccagctggaaagggtcctctttgacgagctagggcttcccgccatcggcaagacggagaagaccggcaagcgctccaccagcgccgccgtcctggaggccctccgcgaggcccaccccatcgtggagaagatcctgcagtaccgggagctcaccaagctgaagagcacctacattgaccccttgccggacctcatccaccccaggacgggccgcctccacacccgcttcaaccagacggccacggccacgggcaggctaagtagctccgatcccaacctccagaacatccccgtccgcaccccgcttgggcagaggatccgccgggccttcatcgccgaggaggggtggctattggtggccctggactatagccagatagagctcagggtgctggcccacctctccggcgacgagaacctgatccgggtcttccaggaggggcgggacatccacacggagaccgccagctggatgttcggcgtcccccgggaggccgtggaccccctgatgcgccgggcggccaagaccatcaacttcggggtcctctacggcatgtcggcccaccgcctctcccaggagctagccatcccttacgaggaggcccaggccttcattgagcgctactttcagagcttccccaaggtgcgggcctggattgagaagaccctggaggagggcaggaggcgggggtacgtggagaccctcttcggccgccgcgcttacgtgccagacctagaggcccgggtgaagagcgtgcgggaggcggccgagcgcatggccttcaacatgcccgtccagggcaccgccgccgacctcatgaagctggctatggtgaagctcttccccaggctggaggaaatgggggccaggatgctccttcaggtccacgacgagctggtcctcgaggccccaaaagagagggcggaggccgtggcccggctggccaaggaggtcatggagggggtgtatcccctggccgtgcccctggaggtggaggtggggataggggaggactggctctccgccaaggagtgataccaccccatgctggcccaagccagcatgggggccccggcaaaaggtttctggggaagttaccaggcatggtgggccgaaggaaacaggaaacaagggtatgagggttttttgccctaaagaaaggccagggggtcctcccgaaggaaggcttccagggggataccccctgggcccaggagtagcccctttcctccaaaggcctgggtgaaggcttttagccctttggtcctttgggaaggggcgcttttgacctccaaagccagaaggcgccttcccttcttcaagacgaagtcaacctcctggtccctttcccgccagtagtacacctcaaagcccccgtgggggccgtgggccagaaggtgggcgcccacggcggtttccacgagccgccccatgagggcggcgtccgcccacacctcctttggggaaagccccaagaccgccgtgatgagccccgtattaagggccaggagcttggggctcgaggcgcggcgccggaagggctcggcggcgtacttctgcag

SEQ ID NO: 3185 - DNA, 3026 bp, Artificial Sequence
  Description of Artificial Sequence: Synthetic DNA sequence of Thermus aquaticus DNA Polymerase R728C
atgagggggatgctgcccctctttgagcccaagggccgggtcctcctggtggacggccaccacctggcctaccgcaccttccacgccctgaagggcctcaccaccagccggggggagccggtgcaggcggtctacggcttcgccaagagcctcctcaaggccctcaaggaggacggggacgcggtgatcgtggtctttgacgccaaggccccctccttccgccacgaggcctacggggggtacaaggcgggccgggcccccacgccggaggactttccccggcaactcgccctcatcaaggagctggtggacctcctggggctggcgcgcctcgaggtcccgggctacgaggcggacgacgtcctggccagcctggccaagaaggcggaaaaggagggctacgaggtccgcatcctcaccgccgacaaagacctttaccagctcctttccgaccgcatccacgccctccaccccgaggggtacctcatcaccccggcctggctttgggaaaagtacggcctgaggcccgaccagtgggccgactaccgggccctgaccggggacgagtccgacaaccttcccggggtcaagggcatcggggagaagacggcgaggaagcttctggaggagtgggggagcctggaagccctcctcaagaacctggaccggctgaagcccgccatccgggagaagatcctggcccacatggacgatctgaagctctcctgggacctggccaaggtgcgcaccgacctgcccctggaggtggacttcgccaaaaggcgggagcccgaccgggagaggcttagggcctttctggagaggcttgagtttggcagcctcctccacgagttcggccttctggaaagccccaaggccctggaggaggccccctggcccccgccggaaggggccttcgtgggctttgtgctttcccgcaaggagcccatgtgggccgatcttctggccctggccgccgccagggggggccgggtccaccgggcccccgagccttataaagccctcagggacctgaaggaggcgcgggggcttctcgccaaagacctgagcgttctggccctgagggaaggccttggcctcccgcccggcgacgaccccatgctcctcgcctacctcctggacccttccaacaccacccccgagggggtggcccggcgctacggcggggagtggacggaggaggcgggggagcgggccgccctttccgagaggctcttcgccaacctgtgggggaggcttgagggggaggagaggctcctttggctttaccgggaggtggagaggcccctttccgctgtcctggcccacatggaggccacgggggtgcgcctggacgtggcctatctcagggccttgtccctggaggtggccgaggagatcgcccgcctcgaggccgaggtcttccgcctggccggccaccccttcaacctcaactcccgggaccagctggaaagggtcctctttgacgagctagggcttcccgccatcggcaagacggagaagaccggcaagcgctccaccagcgccgccgtcctggaggccctccgcgaggcccaccccatcgtggagaagatcctgcagtaccgggagctcaccaagctgaagagcacctacattgaccccttgccggacctcatccaccccaggacgggccgcctccacacccgcttcaaccagacggccacggccacgggcaggctaagtagctccgatcccaacctccagaacatccccgtccgcaccccgcttgggcagaggatccgccgggccttcatcgccgaggaggggtggctattggtggccctggactatagccagatagagctcagggtgctggcccacctctccggcgacgagaacctgatccgggtcttccaggaggggcgggacatccacacggagaccgccagctggatgttcggcgtcccccgggaggccgtggaccccctgatgcgccgggcggccaagaccatcaacttcggggtcctctacggcatgtcggcccaccgcctctcccaggagctagccatcccttacgaggaggcccaggccttcattgagcgctactttcagagcttccccaaggtgcgggcctggattgagaagaccctggaggagggcaggaggcgggggtacgtggagaccctcttcggccgccgctgttacgtgccagacctagaggcccgggtgaagagcgtgcgggaggcggccgagcgcatggccttcaacatgcccgtccagggcaccgccgccgacctcatgaagctggctatggtgaagctcttccccaggctggaggaaatgggggccaggatgctccttcaggtccacgacgagctggtcctcgaggccccaaaagagagggcggaggccgtggcccggctggccaaggaggtcatggagggggtgtatcccctggccgtgcccctggaggtggaggtggggataggggaggactggctctccgccaaggagtgataccaccccatgctggcccaagccagcatgggggccccggcaaaaggtttctggggaagttaccaggcatggtgggccgaaggaaacaggaaacaagggtatgagggttttttgccctaaagaaaggccagggggtcctcccgaaggaaggcttccagggggataccccctgggcccaggagtagcccctttcctccaaaggcctgggtgaaggcttttagccctttggtcctttgggaaggggcgcttttgacctccaaagccagaaggcgccttcccttcttcaagacgaagtcaacctcctggtccctttcccgccagtagtacacctcaaagcccccgtgggggccgtgggccagaaggtgggcgcccacggcggtttccacgagccgccccatgagggcggcgtccgcccacacctcctttggggaaagccccaagaccgccgtgatgagccccgtattaagggccaggagcttggggctcgaggcgcggcgccggaagggctcggcggcgtacttctgcag

SEQ ID NO: 3186 - DNA, 3026 bp, Artificial Sequence
  Description of Artificial Sequence: Synthetic DNA sequence of Thermus aquaticus DNA Polymerase R728G
atgagggggatgctgcccctctttgagcccaagggccgggtcctcctggtggacggccaccacctggcctaccgcaccttccacgccctgaagggcctcaccaccagccggggggagccggtgcaggcggtctacggcttcgccaagagcctcctcaaggccctcaaggaggacggggacgcggtgatcgtggtctttgacgccaaggccccctccttccgccacgaggcctacggggggtacaaggcgggccgggcccccacgccggaggactttccccggcaactcgccctcatcaaggagctggtggacctcctggggctggcgcgcctcgaggtcccgggctacgaggcggacgacgtcctggccagcctggccaagaaggcggaaaaggagggctacgaggtccgcatcctcaccgccgacaaagacctttaccagctcctttccgaccgcatccacgccctccaccccgaggggtacctcatcaccccggcctggctttgggaaaagtacggcctgaggcccgaccagtgggccgactaccgggccctgaccggggacgagtccgacaaccttcccggggtcaagggcatcggggagaagacggcgaggaagcttctggaggagtgggggagcctggaagccctcctcaagaacctggaccggctgaagcccgccatccgggagaagatcctggcccacatggacgatctgaagctctcctgggacctggccaaggtgcgcaccgacctgcccctggaggtggacttcgccaaaaggcgggagcccgaccgggagaggcttagggcctttctggagaggcttgagtttggcagcctcctccacgagttcggccttctggaaagccccaaggccctggaggaggccccctggcccccgccggaaggggccttcgtgggctttgtgctttcccgcaaggagcccatgtgggccgatcttctggccctggccgccgccagggggggccgggtccaccgggcccccgagccttataaagccctcagggacctgaaggaggcgcgggggcttctcgccaaagacctgagcgttctggccctgagggaaggccttggcctcccgcccggcgacgaccccatgctcctcgcctacctcctggacccttccaacaccacccccgagggggtggcccggcgctacggcggggagtggacggaggaggcgggggagcgggccgccctttccgagaggctcttcgccaacctgtgggggaggcttgagggggaggagaggctcctttggctttaccgggaggtggagaggcccctttccgctgtcctggcccacatggaggccacgggggtgcgcctggacgtggcctatctcagggccttgtccctggaggtggccgaggagatcgcccgcctcgaggccgaggtcttccgcctggccggccaccccttcaacctcaactcccgggaccagctggaaagggtcctctttgacgagctagggcttcccgccatcggcaagacggagaagaccggcaagcgctccaccagcgccgccgtcctggaggccctccgcgaggcccaccccatcgtggagaagatcctgcagtaccgggagctcaccaagctgaagagcacctacattgaccccttgccggacctcatccaccccaggacgggccgcctccacacccgcttcaaccagacggccacggccacgggcaggctaagtagctccgatcccaacctccagaacatccccgtccgcaccccgcttgggcagaggatccgccgggccttcatcgccgaggaggggtggctattggtggccctggactatagccagatagagctcagggtgctggcccacctctccggcgacgagaacctgatccgggtcttccaggaggggcgggacatccacacggagaccgccagctggatgttcggcgtcccccgggaggccgtggaccccctgatgcgccgggcggccaagaccatcaacttcggggtcctctacggcatgtcggcccaccgcctctcccaggagctagccatcccttacgaggaggcccaggccttcattgagcgctactttcagagcttccccaaggtgcgggcctggattgagaagaccctggaggagggcaggaggcgggggtacgtggagaccctcttcggccgccgcggttacgtgccagacctagaggcccgggtgaagagcgtgcgggaggcggccgagcgcatggccttcaacatgcccgtccagggcaccgccgccgacctcatgaagctggctatggtgaagctcttccccaggctggaggaaatgggggccaggatgctccttcaggtccacgacgagctggtcctcgaggccccaaaagagagggcggaggccgtggcccggctggccaaggaggtcatggagggggtgtatcccctggccgtgcccctggaggtggaggtggggataggggaggactggctctccgccaaggagtgataccaccccatgctggcccaagccagcatgggggccccggcaaaaggtttctggggaagttaccaggcatggtgggccgaaggaaacaggaaacaagggtatgagggttttttgccctaaagaaaggccagggggtcctcccgaaggaaggcttccagggggataccccctgggcccaggagtagcccctttcctccaaaggcctgggtgaaggcttttagccctttggtcctttgggaaggggcgcttttgacctccaaagccagaaggcgccttcccttcttcaagacgaagtcaacctcctggtccctttcccgccagtagtacacctcaaagcccccgtgggggccgtgggccagaaggtgggcgcccacggcggtttccacgagccgccccatgagggcggcgtccgcccacacctcctttggggaaagccccaagaccgccgtgatgagccccgtattaagggccaggagcttggggctcgaggcgcggcgccggaagggctcggcggcgtacttctgcag

SEQ ID NO: 3187 - DNA, 3026 bp, Artificial Sequence
  Description of Artificial Sequence: Synthetic DNA sequence of Thermus aquaticus DNA Polymerase R728Q
atgagggggatgctgcccctctttgagcccaagggccgggtcctcctggtggacggccaccacctggcctaccgcaccttccacgccctgaagggcctcaccaccagccggggggagccggtgcaggcggtctacggcttcgccaagagcctcctcaaggccctcaaggaggacggggacgcggtgatcgtggtctttgacgccaaggccccctccttccgccacgaggcctacggggggtacaaggcgggccgggcccccacgccggaggactttccccggcaactcgccctcatcaaggagctggtggacctcctggggctggcgcgcctcgaggtcccgggctacgaggcggacgacgtcctggccagcctggccaagaaggcggaaaaggagggctacgaggtccgcatcctcaccgccgacaaagacctttaccagctcctttccgaccgcatccacgccctccaccccgaggggtacctcatcaccccggcctggctttgggaaaagtacggcctgaggcccgaccagtgggccgactaccgggccctgaccggggacgagtccgacaaccttcccggggtcaagggcatcggggagaagacggcgaggaagcttctggaggagtgggggagcctggaagccctcctcaagaacctggaccggctgaagcccgccatccgggagaagatcctggcccacatggacgatctgaagctctcctgggacctggccaaggtgcgcaccgacctgcccctggaggtggacttcgccaaaaggcgggagcccgaccgggagaggcttagggcctttctggagaggcttgagtttggcagcctcctccacgagttcggccttctggaaagccccaaggccctggaggaggccccctggcccccgccggaaggggccttcgtgggctttgtgctttcccgcaaggagcccatgtgggccgatcttctggccctggccgccgccagggggggccgggtccaccgggcccccgagccttataaagccctcagggacctgaaggaggcgcgggggcttctcgccaaagacctgagcgttctggccctgagggaaggccttggcctcccgcccggcgacgaccccatgctcctcgcctacctcctggacccttccaacaccacccccgagggggtggcccggcgctacggcggggagtggacggaggaggcgggggagcgggccgccctttccgagaggctcttcgccaacctgtgggggaggcttgagggggaggagaggctcctttggctttaccgggaggtggagaggcccctttccgctgtcctggcccacatggaggccacgggggtgcgcctggacgtggcctatctcagggccttgtccctggaggtggccgaggagatcgcccgcctcgaggccgaggtcttccgcctggccggccaccccttcaacctcaactcccgggaccagctggaaagggtcctctttgacgagctagggcttcccgccatcggcaagacggagaagaccggcaagcgctccaccagcgccgccgtcctggaggccctccgcgaggcccaccccatcgtggagaagatcctgcagtaccgggagctcaccaagctgaagagcacctacattgaccccttgccggacctcatccaccccaggacgggccgcctccacacccgcttcaaccagacggccacggccacgggcaggctaagtagctccgatcccaacctccagaacatccccgtccgcaccccgcttgggcagaggatccgccgggccttcatcgccgaggaggggtggctattggtggccctggactatagccagatagagctcagggtgctggcccacctctccggcgacgagaacctgatccgggtcttccaggaggggcgggacatccacacggagaccgccagctggatgttcggcgtcccccgggaggccgtggaccccctgatgcgccgggcggccaagaccatcaacttcggggtcctctacggcatgtcggcccaccgcctctcccaggagctagccatcccttacgaggaggcccaggccttcattgagcgctactttcagagcttccccaaggtgcgggcctggattgagaagaccctggaggagggcaggaggcgggggtacgtggagaccctcttcggccgccgccaatacgtgccagacctagaggcccgggtgaagagcgtgcgggaggcggccgagcgcatggccttcaacatgcccgtccagggcaccgccgccgacctcatgaagctggctatggtgaagctcttccccaggctggaggaaatgggggccaggatgctccttcaggtccacgacgagctggtcctcgaggccccaaaagagagggcggaggccgtggcccggctggccaaggaggtcatggagggggtgtatcccctggccgtgcccctggaggtggaggtggggataggggaggactggctctccgccaaggagtgataccaccccatgctggcccaagccagcatgggggccccggcaaaaggtttctggggaagttaccaggcatggtgggccgaaggaaacaggaaacaagggtatgagggttttttgccctaaagaaaggccagggggtcctcccgaaggaaggcttccagggggataccccctgggcccaggagtagcccctttcctccaaaggcctgggtgaaggcttttagccctttggtcctttgggaaggggcgcttttgacctccaaagccagaaggcgccttcccttcttcaagacgaagtcaacctcctggtccctttcccgccagtagtacacctcaaagcccccgtgggggccgtgggccagaaggtgggcgcccacggcggtttccacgagccgccccatgagggcggcgtccgcccacacctcctttggggaaagccccaagaccgccgtgatgagccccgtattaagggccaggagcttggggctcgaggcgcggcgccggaagggctcggcggcgtacttctgcag

SEQ ID NO: 3188 - DNA, 3026 bp, Artificial Sequence
  Description of Artificial Sequence: Synthetic DNA sequence of Thermus aquaticus DNA Polymerase R728H
atgagggggatgctgcccctctttgagcccaagggccgggtcctcctggtggacggccaccacctggcctaccgcaccttccacgccctgaagggcctcaccaccagccggggggagccggtgcaggcggtctacggcttcgccaagagcctcctcaaggccctcaaggaggacggggacgcggtgatcgtggtctttgacgccaaggccccctccttccgccacgaggcctacggggggtacaaggcgggccgggcccccacgccggaggactttccccggcaactcgccctcatcaaggagctggtggacctcctggggctggcgcgcctcgaggtcccgggctacgaggcggacgacgtcctggccagcctggccaagaaggcggaaaaggagggctacgaggtccgcatcctcaccgccgacaaagacctttaccagctcctttccgaccgcatccacgccctccaccccgaggggtacctcatcaccccggcctggctttgggaaaagtacggcctgaggcccgaccagtgggccgactaccgggccctgaccggggacgagtccgacaaccttcccggggtcaagggcatcggggagaagacggcgaggaagcttctggaggagtgggggagcctggaagccctcctcaagaacctggaccggctgaagcccgccatccgggagaagatcctggcccacatggacgatctgaagctctcctgggacctggccaaggtgcgcaccgacctgcccctggaggtggacttcgccaaaaggcgggagcccgaccgggagaggcttagggcctttctggagaggcttgagtttggcagcctcctccacgagttcggccttctggaaagccccaaggccctggaggaggccccctggcccccgccggaaggggccttcgtgggctttgtgctttcccgcaaggagcccatgtgggccgatcttctggccctggccgccgccagggggggccgggtccaccgggcccccgagccttataaagccctcagggacctgaaggaggcgcgggggcttctcgccaaagacctgagcgttctggccctgagggaaggccttggcctcccgcccggcgacgaccccatgctcctcgcctacctcctggacccttccaacaccacccccgagggggtggcccggcgctacggcggggagtggacggaggaggcgggggagcgggccgccctttccgagaggctcttcgccaacctgtgggggaggcttgagggggaggagaggctcctttggctttaccgggaggtggagaggcccctttccgctgtcctggcccacatggaggccacgggggtgcgcctggacgtggcctatctcagggccttgtccctggaggtggccgaggagatcgcccgcctcgaggccgaggtcttccgcctggccggccaccccttcaacctcaactcccgggaccagctggaaagggtcctctttgacgagctagggcttcccgccatcggcaagacggagaagaccggcaagcgctccaccagcgccgccgtcctggaggccctccgcgaggcccaccccatcgtggagaagatcctgcagtaccgggagctcaccaagctgaagagcacctacattgaccccttgccggacctcatccaccccaggacgggccgcctccacacccgcttcaaccagacggccacggccacgggcaggctaagtagctccgatcccaacctccagaacatccccgtccgcaccccgcttgggcagaggatccgccgggccttcatcgccgaggaggggtggctattggtggccctggactatagccagatagagctcagggtgctggcccacctctccggcgacgagaacctgatccgggtcttccaggaggggcgggacatccacacggagaccgccagctggatgttcggcgtcccccgggaggccgtggaccccctgatgcgccgggcggccaagaccatcaacttcggggtcctctacggcatgtcggcccaccgcctctcccaggagctagccatcccttacgaggaggcccaggccttcattgagcgctactttcagagcttccccaaggtgcgggcctggattgagaagaccctggaggagggcaggaggcgggggtacgtggagaccctcttcggccgccgccattacgtgccagacctagaggcccgggtgaagagcgtgcgggaggcggccgagcgcatggccttcaacatgcccgtccagggcaccgccgccgacctcatgaagctggctatggtgaagctcttccccaggctggaggaaatgggggccaggatgctccttcaggtccacgacgagctggtcctcgaggccccaaaagagagggcggaggccgtggcccggctggccaaggaggtcatggagggggtgtatcccctggccgtgcccctggaggtggaggtggggataggggaggactggctctccgccaaggagtgataccaccccatgctggcccaagccagcatgggggccccggcaaaaggtttctggggaagttaccaggcatggtgggccgaaggaaacaggaaacaagggtatgagggttttttgccctaaagaaaggccagggggtcctcccgaaggaaggcttccagggggataccccctgggcccaggagtagcccctttcctccaaaggcctgggtgaaggcttttagccctttggtcctttgggaaggggcgcttttgacctccaaagccagaaggcgccttcccttcttcaagacgaagtcaacctcctggtccctttcccgccagtagtacacctcaaagcccccgtgggggccgtgggccagaaggtgggcgcccacggcggtttccacgagccgccccatgagggcggcgtccgcccacacctcctttggggaaagccccaagaccgccgtgatgagccccgtattaagggccaggagcttggggctcgaggcgcggcgccggaagggctcggcggcgtacttctgcag

SEQ ID NO: 3189 - DNA, 3026 bp, Artificial Sequence
  Description of Artificial Sequence: Synthetic DNA sequence of Thermus aquaticus DNA Polymerase R728I
atgagggggatgctgcccctctttgagcccaagggccgggtcctcctggtggacggccaccacctggcctaccgcaccttccacgccctgaagggcctcaccaccagccggggggagccggtgcaggcggtctacggcttcgccaagagcctcctcaaggccctcaaggaggacggggacgcggtgatcgtggtctttgacgccaaggccccctccttccgccacgaggcctacggggggtacaaggcgggccgggcccccacgccggaggactttccccggcaactcgccctcatcaaggagctggtggacctcctggggctggcgcgcctcgaggtcccgggctacgaggcggacgacgtcctggccagcctggccaagaaggcggaaaaggagggctacgaggtccgcatcctcaccgccgacaaagacctttaccagctcctttccgaccgcatccacgccctccaccccgaggggtacctcatcaccccggcctggctttgggaaaagtacggcctgaggcccgaccagtgggccgactaccgggccctgaccggggacgagtccgacaaccttcccggggtcaagggcatcggggagaagacggcgaggaagcttctggaggagtgggggagcctggaagccctcctcaagaacctggaccggctgaagcccgccatccgggagaagatcctggcccacatggacgatctgaagctctcctgggacctggccaaggtgcgcaccgacctgcccctggaggtggacttcgccaaaaggcgggagcccgaccgggagaggcttagggcctttctggagaggcttgagtttggcagcctcctccacgagttcggccttctggaaagccccaaggccctggaggaggccccctggcccccgccggaaggggccttcgtgggctttgtgctttcccgcaaggagcccatgtgggccgatcttctggccctggccgccgccagggggggccgggtccaccgggcccccgagccttataaagccctcagggacctgaaggaggcgcgggggcttctcgccaaagacctgagcgttctggccctgagggaaggccttggcctcccgcccggcgacgaccccatgctcctcgcctacctcctggacccttccaacaccacccccgagggggtggcccggcgctacggcggggagtggacggaggaggcgggggagcgggccgccctttccgagaggctcttcgccaacctgtgggggaggcttgagggggaggagaggctcctttggctttaccgggaggtggagaggcccctttccgctgtcctggcccacatggaggccacgggggtgcgcctggacgtggcctatctcagggccttgtccctggaggtggccgaggagatcgcccgcctcgaggccgaggtcttccgcctggccggccaccccttcaacctcaactcccgggaccagctggaaagggtcctctttgacgagctagggcttcccgccatcggcaagacggagaagaccggcaagcgctccaccagcgccgccgtcctggaggccctccgcgaggcccaccccatcgtggagaagatcctgcagtaccgggagctcaccaagctgaagagcacctacattgaccccttgccggacctcatccaccccaggacgggccgcctccacacccgcttcaaccagacggccacggccacgggcaggctaagtagctccgatcccaacctccagaacatccccgtccgcaccccgcttgggcagaggatccgccgggccttcatcgccgaggaggggtggctattggtggccctggactatagccagatagagctcagggtgctggcccacctctccggcgacgagaacctgatccgggtcttccaggaggggcgggacatccacacggagaccgccagctggatgttcggcgtcccccgggaggccgtggaccccctgatgcgccgggcggccaagaccatcaacttcggggtcctctacggcatgtcggcccaccgcctctcccaggagctagccatcccttacgaggaggcccaggccttcattgagcgctactttcagagcttccccaaggtgcgggcctggattgagaagaccctggaggagggcaggaggcgggggtacgtggagaccctcttcggccgccgcatttacgtgccagacctagaggcccgggtgaagagcgtgcgggaggcggccgagcgcatggccttcaacatgcccgtccagggcaccgccgccgacctcatgaagctggctatggtgaagctcttccccaggctggaggaaatgggggccaggatgctccttcaggtccacgacgagctggtcctcgaggccccaaaagagagggcggaggccgtggcccggctggccaaggaggtcatggagggggtgtatcccctggccgtgcccctggaggtggaggtggggataggggaggactggctctccgccaaggagtgataccaccccatgctggcccaagccagcatgggggccccggcaaaaggtttctggggaagttaccaggcatggtgggccgaaggaaacaggaaacaagggtatgagggttttttgccctaaagaaaggccagggggtcctcccgaaggaaggcttccagggggataccccctgggcccaggagtagcccctttcctccaaaggcctgggtgaaggcttttagccctttggtcctttgggaaggggcgcttttgacctccaaagccagaaggcgccttcccttcttcaagacgaagtcaacctcctggtccctttcccgccagtagtacacctcaaagcccccgtgggggccgtgggccagaaggtgggcgcccacggcggtttccacgagccgccccatgagggcggcgtccgcccacacctcctttggggaaagccccaagaccgccgtgatgagccccgtattaagggccaggagcttggggctcgaggcgcggcgccggaagggctcggcggcgtacttctgcag

SEQ ID NO: 3190 - DNA, 3026 bp, Artificial Sequence
  Description of Artificial Sequence: Synthetic DNA sequence of Thermus aquaticus DNA Polymerase R728L
atgagggggatgctgcccctctttgagcccaagggccgggtcctcctggtggacggccaccacctggcctaccgcaccttccacgccctgaagggcctcaccaccagccggggggagccggtgcaggcggtctacggcttcgccaagagcctcctcaaggccctcaaggaggacggggacgcggtgatcgtggtctttgacgccaaggccccctccttccgccacgaggcctacggggggtacaaggcgggccgggcccccacgccggaggactttccccggcaactcgccctcatcaaggagctggtggacctcctggggctggcgcgcctcgaggtcccgggctacgaggcggacgacgtcctggccagcctggccaagaaggcggaaaaggagggctacgaggtccgcatcctcaccgccgacaaagacctttaccagctcctttccgaccgcatccacgccctccaccccgaggggtacctcatcaccccggcctggctttgggaaaagtacggcctgaggcccgaccagtgggccgactaccgggccctgaccggggacgagtccgacaaccttcccggggtcaagggcatcggggagaagacggcgaggaagcttctggaggagtgggggagcctggaagccctcctcaagaacctggaccggctgaagcccgccatccgggagaagatcctggcccacatggacgatctgaagctctcctgggacctggccaaggtgcgcaccgacctgcccctggaggtggacttcgccaaaaggcgggagcccgaccgggagaggcttagggcctttctggagaggcttgagtttggcagcctcctccacgagttcggccttctggaaagccccaaggccctggaggaggccccctggcccccgccggaaggggccttcgtgggctttgtgctttcccgcaaggagcccatgtgggccgatcttctggccctggccgccgccagggggggccgggtccaccgggcccccgagccttataaagccctcagggacctgaaggaggcgcgggggcttctcgccaaagacctgagcgttctggccctgagggaaggccttggcctcccgcccggcgacgaccccatgctcctcgcctacctcctggacccttccaacaccacccccgagggggtggcccggcgctacggcggggagtggacggaggaggcgggggagcgggccgccctttccgagaggctcttcgccaacctgtgggggaggcttgagggggaggagaggctcctttggctttaccgggaggtggagaggcccctttccgctgtcctggcccacatggaggccacgggggtgcgcctggacgtggcctatctcagggccttgtccctggaggtggccgaggagatcgcccgcctcgaggccgaggtcttccgcctggccggccaccccttcaacctcaactcccgggaccagctggaaagggtcctctttgacgagctagggcttcccgccatcggcaagacggagaagaccggcaagcgctccaccagcgccgccgtcctggaggccctccgcgaggcccaccccatcgtggagaagatcctgcagtaccgggagctcaccaagctgaagagcacctacattgaccccttgccggacctcatccaccccaggacgggccgcctccacacccgcttcaaccagacggccacggccacgggcaggctaagtagctccgatcccaacctccagaacatccccgtccgcaccccgcttgggcagaggatccgccgggccttcatcgccgaggaggggtggctattggtggccctggactatagccagatagagctcagggtgctggcccacctctccggcgacgagaacctgatccgggtcttccaggaggggcgggacatccacacggagaccgccagctggatgttcggcgtcccccgggaggccgtggaccccctgatgcgccgggcggccaagaccatcaacttcggggtcctctacggcatgtcggcccaccgcctctcccaggagctagccatcccttacgaggaggcccaggccttcattgagcgctactttcagagcttccccaaggtgcgggcctggattgagaagaccctggaggagggcaggaggcgggggtacgtggagaccctcttcggccgccgcttatacgtgccagacctagaggcccgggtgaagagcgtgcgggaggcggccgagcgcatggccttcaacatgcccgtccagggcaccgccgccgacctcatgaagctggctatggtgaagctcttccccaggctggaggaaatgggggccaggatgctccttcaggtccacgacgagctggtcctcgaggccccaaaagagagggcggaggccgtggcccggctggccaaggaggtcatggagggggtgtatcccctggccgtgcccctggaggtggaggtggggataggggaggactggctctccgccaaggagtgataccaccccatgctggcccaagccagcatgggggccccggcaaaaggtttctggggaagttaccaggcatggtgggccgaaggaaacaggaaacaagggtatgagggttttttgccctaaagaaaggccagggggtcctcccgaaggaaggcttccagggggataccccctgggcccaggagtagcccctttcctccaaaggcctgggtgaaggcttttagccctttggtcctttgggaaggggcgcttttgacctccaaagccagaaggcgccttcccttcttcaagacgaagtcaacctcctggtccctttcccgccagtagtacacctcaaagcccccgtgggggccgtgggccagaaggtgggcgcccacggcggtttccacgagccgccccatgagggcggcgtccgcccacacctcctttggggaaagccccaagaccgccgtgatgagccccgtattaagggccaggagcttggggctcgaggcgcggcgccggaagggctcggcggcgtacttctgcag

SEQ ID NO: 3191 - DNA, 3026 bp, Artificial Sequence
  Description of Artificial Sequence: Synthetic DNA sequence of Thermus aquaticus DNA Polymerase R728K
atgagggggatgctgcccctctttgagcccaagggccgggtcctcctggtggacggccaccacctggcctaccgcaccttccacgccctgaagggcctcaccaccagccggggggagccggtgcaggcggtctacggcttcgccaagagcctcctcaaggccctcaaggaggacggggacgcggtgatcgtggtctttgacgccaaggccccctccttccgccacgaggcctacggggggtacaaggcgggccgggcccccacgccggaggactttccccggcaactcgccctcatcaaggagctggtggacctcctggggctggcgcgcctcgaggtcccgggctacgaggcggacgacgtcctggccagcctggccaagaaggcggaaaaggagggctacgaggtccgcatcctcaccgccgacaaagacctttaccagctcctttccgaccgcatccacgccctccaccccgaggggtacctcatcaccccggcctggctttgggaaaagtacggcctgaggcccgaccagtgggccgactaccgggccctgaccggggacgagtccgacaaccttcccggggtcaagggcatcggggagaagacggcgaggaagcttctggaggagtgggggagcctggaagccctcctcaagaacctggaccggctgaagcccgccatccgggagaagatcctggcccacatggacgatctgaagctctcctgggacctggccaaggtgcgcaccgacctgcccctggaggtggacttcgccaaaaggcgggagcccgaccgggagaggcttagggcctttctggagaggcttgagtttggcagcctcctccacgagttcggccttctggaaagccccaaggccctggaggaggccccctggcccccgccggaaggggccttcgtgggctttgtgctttcccgcaaggagcccatgtgggccgatcttctggccctggccgccgccagggggggccgggtccaccgggcccccgagccttataaagccctcagggacctgaaggaggcgcgggggcttctcgccaaagacctgagcgttctggccctgagggaaggccttggcctcccgcccggcgacgaccccatgctcctcgcctacctcctggacccttccaacaccacccccgagggggtggcccggcgctacggcggggagtggacggaggaggcgggggagcgggccgccctttccgagaggctcttcgccaacctgtgggggaggcttgagggggaggagaggctcctttggctttaccgggaggtggagaggcccctttccgctgtcctggcccacatggaggccacgggggtgcgcctggacgtggcctatctcagggccttgtccctggaggtggccgaggagatcgcccgcctcgaggccgaggtcttccgcctggccggccaccccttcaacctcaactcccgggaccagctggaaagggtcctctttgacgagctagggcttcccgccatcggcaagacggagaagaccggcaagcgctccaccagcgccgccgtcctggaggccctccgcgaggcccaccccatcgtggagaagatcctgcagtaccgggagctcaccaagctgaagagcacctacattgaccccttgccggacctcatccaccccaggacgggccgcctccacacccgcttcaaccagacggccacggccacgggcaggctaagtagctccgatcccaacctccagaacatccccgtccgcaccccgcttgggcagaggatccgccgggccttcatcgccgaggaggggtggctattggtggccctggactatagccagatagagctcagggtgctggcccacctctccggcgacgagaacctgatccgggtcttccaggaggggcgggacatccacacggagaccgccagctggatgttcggcgtcccccgggaggccgtggaccccctgatgcgccgggcggccaagaccatcaacttcggggtcctctacggcatgtcggcccaccgcctctcccaggagctagccatcccttacgaggaggcccaggccttcattgagcgctactttcagagcttccccaaggtgcgggcctggattgagaagaccctggaggagggcaggaggcgggggtacgtggagaccctcttcggccgccgcaaatacgtgccagacctagaggcccgggtgaagagcgtgcgggaggcggccgagcgcatggccttcaacatgcccgtccagggcaccgccgccgacctcatgaagctggctatggtgaagctcttccccaggctggaggaaatgggggccaggatgctccttcaggtccacgacgagctggtcctcgaggccccaaaagagagggcggaggccgtggcccggctggccaaggaggtcatggagggggtgtatcccctggccgtgcccctggaggtggaggtggggataggggaggactggctctccgccaaggagtgataccaccccatgctggcccaagccagcatgggggccccggcaaaaggtttctggggaagttaccaggcatggtgggccgaaggaaacaggaaacaagggtatgagggttttttgccctaaagaaaggccagggggtcctcccgaaggaaggcttccagggggataccccctgggcccaggagtagcccctttcctccaaaggcctgggtgaaggcttttagccctttggtcctttgggaaggggcgcttttgacctccaaagccagaaggcgccttcccttcttcaagacgaagtcaacctcctggtccctttcccgccagtagtacacctcaaagcccccgtgggggccgtgggccagaaggtgggcgcccacggcggtttccacgagccgccccatgagggcggcgtccgcccacacctcctttggggaaagccccaagaccgccgtgatgagccccgtattaagggccaggagcttggggctcgaggcgcggcgccggaagggctcggcggcgtacttctgcag

SEQ ID NO: 3192 - DNA, 3026 bp, Artificial Sequence
  Description of Artificial Sequence: Synthetic DNA sequence of Thermus aquaticus DNA Polymerase R728E
atgagggggatgctgcccctctttgagcccaagggccgggtcctcctggtggacggccaccacctggcctaccgcaccttccacgccctgaagggcctcaccaccagccggggggagccggtgcaggcggtctacggcttcgccaagagcctcctcaaggccctcaaggaggacggggacgcggtgatcgtggtctttgacgccaaggccccctccttccgccacgaggcctacggggggtacaaggcgggccgggcccccacgccggaggactttccccggcaactcgccctcatcaaggagctggtggacctcctggggctggcgcgcctcgaggtcccgggctacgaggcggacgacgtcctggccagcctggccaagaaggcggaaaaggagggctacgaggtccgcatcctcaccgccgacaaagacctttaccagctcctttccgaccgcatccacgccctccaccccgaggggtacctcatcaccccggcctggctttgggaaaagtacggcctgaggcccgaccagtgggccgactaccgggccctgaccggggacgagtccgacaaccttcccggggtcaagggcatcggggagaagacggcgaggaagcttctggaggagtgggggagcctggaagccctcctcaagaacctggaccggctgaagcccgccatccgggagaagatcctggcccacatggacgatctgaagctctcctgggacctggccaaggtgcgcaccgacctgcccctggaggtggacttcgccaaaaggcgggagcccgaccgggagaggcttagggcctttctggagaggcttgagtttggcagcctcctccacgagttcggccttctggaaagccccaaggccctggaggaggccccctggcccccgccggaaggggccttcgtgggctttgtgctttcccgcaaggagcccatgtgggccgatcttctggccctggccgccgccagggggggccgggtccaccgggcccccgagccttataaagccctcagggacctgaaggaggcgcgggggcttctcgccaaagacctgagcgttctggccctgagggaaggccttggcctcccgcccggcgacgaccccatgctcctcgcctacctcctggacccttccaacaccacccccgagggggtggcccggcgctacggcggggagtggacggaggaggcgggggagcgggccgccctttccgagaggctcttcgccaacctgtgggggaggcttgagggggaggagaggctcctttggctttaccgggaggtggagaggcccctttccgctgtcctggcccacatggaggccacgggggtgcgcctggacgtggcctatctcagggccttgtccctggaggtggccgaggagatcgcccgcctcgaggccgaggtcttccgcctggccggccaccccttcaacctcaactcccgggaccagctggaaagggtcctctttgacgagctagggcttcccgccatcggcaagacggagaagaccggcaagcgctccaccagcgccgccgtcctggaggccctccgcgaggcccaccccatcgtggagaagatcctgcagtaccgggagctcaccaagctgaagagcacctacattgaccccttgccggacctcatccaccccaggacgggccgcctccacacccgcttcaaccagacggccacggccacgggcaggctaagtagctccgatcccaacctccagaacatccccgtccgcaccccgcttgggcagaggatccgccgggccttcatcgccgaggaggggtggctattggtggccctggactatagccagatagagctcagggtgctggcccacctctccggcgacgagaacctgatccgggtcttccaggaggggcgggacatccacacggagaccgccagctggatgttcggcgtcccccgggaggccgtggaccccctgatgcgccgggcggccaagaccatcaacttcggggtcctctacggcatgtcggcccaccgcctctcccaggagctagccatcccttacgaggaggcccaggccttcattgagcgctactttcagagcttccccaaggtgcgggcctggattgagaagaccctggaggagggcaggaggcgggggtacgtggagaccctcttcggccgccgcgaatacgtgccagacctagaggcccgggtgaagagcgtgcgggaggcggccgagcgcatggccttcaacatgcccgtccagggcaccgccgccgacctcatgaagctggctatggtgaagctcttccccaggctggaggaaatgggggccaggatgctccttcaggtccacgacgagctggtcctcgaggccccaaaagagagggcggaggccgtggcccggctggccaaggaggtcatggagggggtgtatcccctggccgtgcccctggaggtggaggtggggataggggaggactggctctccgccaaggagtgataccaccccatgctggcccaagccagcatgggggccccggcaaaaggtttctggggaagttaccaggcatggtgggccgaaggaaacaggaaacaagggtatgagggttttttgccctaaagaaaggccagggggtcctcccgaaggaaggcttccagggggataccccctgggcccaggagtagcccctttcctccaaaggcctgggtgaaggcttttagccctttggtcctttgggaaggggcgcttttgacctccaaagccagaaggcgccttcccttcttcaagacgaagtcaacctcctggtccctttcccgccagtagtacacctcaaagcccccgtgggggccgtgggccagaaggtgggcgcccacggcggtttccacgagccgccccatgagggcggcgtccgcccacacctcctttggggaaagccccaagaccgccgtgatgagccccgtattaagggccaggagcttggggctcgaggcgcggcgccggaagggctcggcggcgtacttctgcag

SEQ ID NO: 3193 - DNA, 3026 bp, Artificial Sequence
  Description of Artificial Sequence: Synthetic DNA sequence of Thermus aquaticus DNA Polymerase R728D
atgagggggatgctgcccctctttgagcccaagggccgggtcctcctggtggacggccaccacctggcctaccgcaccttccacgccctgaagggcctcaccaccagccggggggagccggtgcaggcggtctacggcttcgccaagagcctcctcaaggccctcaaggaggacggggacgcggtgatcgtggtctttgacgccaaggccccctccttccgccacgaggcctacggggggtacaaggcgggccgggcccccacgccggaggactttccccggcaactcgccctcatcaaggagctggtggacctcctggggctggcgcgcctcgaggtcccgggctacgaggcggacgacgtcctggccagcctggccaagaaggcggaaaaggagggctacgaggtccgcatcctcaccgccgacaaagacctttaccagctcctttccgaccgcatccacgccctccaccccgaggggtacctcatcaccccggcctggctttgggaaaagtacggcctgaggcccgaccagtgggccgactaccgggccctgaccggggacgagtccgacaaccttcccggggtcaagggcatcggggagaagacggcgaggaagcttctggaggagtgggggagcctggaagccctcctcaagaacctggaccggctgaagcccgccatccgggagaagatcctggcccacatggacgatctgaagctctcctgggacctggccaaggtgcgcaccgacctgcccctggaggtggacttcgccaaaaggcgggagcccgaccgggagaggcttagggcctttctggagaggcttgagtttggcagcctcctccacgagttcggccttctggaaagccccaaggccctggaggaggccccctggcccccgccggaaggggccttcgtgggctttgtgctttcccgcaaggagcccatgtgggccgatcttctggccctggccgccgccagggggggccgggtccaccgggcccccgagccttataaagccctcagggacctgaaggaggcgcgggggcttctcgccaaagacctgagcgttctggccctgagggaaggccttggcctcccgcccggcgacgaccccatgctcctcgcctacctcctggacccttccaacaccacccccgagggggtggcccggcgctacggcggggagtggacggaggaggcgggggagcgggccgccctttccgagaggctcttcgccaacctgtgggggaggcttgagggggaggagaggctcctttggctttaccgggaggtggagaggcccctttccgctgtcctggcccacatggaggccacgggggtgcgcctggacgtggcctatctcagggccttgtccctggaggtggccgaggagatcgcccgcctcgaggccgaggtcttccgcctggccggccaccccttcaacctcaactcccgggaccagctggaaagggtcctctttgacgagctagggcttcccgccatcggcaagacggagaagaccggcaagcgctccaccagcgccgccgtcctggaggccctccgcgaggcccaccccatcgtggagaagatcctgcagtaccgggagctcaccaagctgaagagcacctacattgaccccttgccggacctcatccaccccaggacgggccgcctccacacccgcttcaaccagacggccacggccacgggcaggctaagtagctccgatcccaacctccagaacatccccgtccgcaccccgcttgggcagaggatccgccgggccttcatcgccgaggaggggtggctattggtggccctggactatagccagatagagctcagggtgctggcccacctctccggcgacgagaacctgatccgggtcttccaggaggggcgggacatccacacggagaccgccagctggatgttcggcgtcccccgggaggccgtggaccccctgatgcgccgggcggccaagaccatcaacttcggggtcctctacggcatgtcggcccaccgcctctcccaggagctagccatcccttacgaggaggcccaggccttcattgagcgctactttcagagcttccccaaggtgcgggcctggattgagaagaccctggaggagggcaggaggcgggggtacgtggagaccctcttcggccgccgcgattacgtgccagacctagaggcccgggtgaagagcgtgcgggaggcggccgagcgcatggccttcaacatgcccgtccagggcaccgccgccgacctcatgaagctggctatggtgaagctcttccccaggctggaggaaatgggggccaggatgctccttcaggtccacgacgagctggtcctcgaggccccaaaagagagggcggaggccgtggcccggctggccaaggaggtcatggagggggtgtatcccctggccgtgcccctggaggtggaggtggggataggggaggactggctctccgccaaggagtgataccaccccatgctggcccaagccagcatgggggccccggcaaaaggtttctggggaagttaccaggcatggtgggccgaaggaaacaggaaacaagggtatgagggttttttgccctaaagaaaggccagggggtcctcccgaaggaaggcttccagggggataccccctgggcccaggagtagcccctttcctccaaaggcctgggtgaaggcttttagccctttggtcctttgggaaggggcgcttttgacctccaaagccagaaggcgccttcccttcttcaagacgaagtcaacctcctggtccctttcccgccagtagtacacctcaaagcccccgtgggggccgtgggccagaaggtgggcgcccacggcggtttccacgagccgccccatgagggcggcgtccgcccacacctcctttggggaaagccccaagaccgccgtgatgagccccgtattaagggccaggagcttggggctcgaggcgcggcgccggaagggctcggcggcgtacttctgcag

SEQ ID NO: 3194 - DNA, 3026 bp, Artificial Sequence
  Description of Artificial Sequence: Synthetic DNA sequence of Thermus aquaticus DNA Polymerase R728F
atgagggggatgctgcccctctttgagcccaagggccgggtcctcctggtggacggccaccacctggcctaccgcaccttccacgccctgaagggcctcaccaccagccggggggagccggtgcaggcggtctacggcttcgccaagagcctcctcaaggccctcaaggaggacggggacgcggtgatcgtggtctttgacgccaaggccccctccttccgccacgaggcctacggggggtacaaggcgggccgggcccccacgccggaggactttccccggcaactcgccctcatcaaggagctggtggacctcctggggctggcgcgcctcgaggtcccgggctacgaggcggacgacgtcctggccagcctggccaagaaggcggaaaaggagggctacgaggtccgcatcctcaccgccgacaaagacctttaccagctcctttccgaccgcatccacgccctccaccccgaggggtacctcatcaccccggcctggctttgggaaaagtacggcctgaggcccgaccagtgggccgactaccgggccctgaccggggacgagtccgacaaccttcccggggtcaagggcatcggggagaagacggcgaggaagcttctggaggagtgggggagcctggaagccctcctcaagaacctggaccggctgaagcccgccatccgggagaagatcctggcccacatggacgatctgaagctctcctgggacctggccaaggtgcgcaccgacctgcccctggaggtggacttcgccaaaaggcgggagcccgaccgggagaggcttagggcctttctggagaggcttgagtttggcagcctcctccacgagttcggccttctggaaagccccaaggccctggaggaggccccctggcccccgccggaaggggccttcgtgggctttgtgctttcccgcaaggagcccatgtgggccgatcttctggccctggccgccgccagggggggccgggtccaccgggcccccgagccttataaagccctcagggacctgaaggaggcgcgggggcttctcgccaaagacctgagcgttctggccctgagggaaggccttggcctcccgcccggcgacgaccccatgctcctcgcctacctcctggacccttccaacaccacccccgagggggtggcccggcgctacggcggggagtggacggaggaggcgggggagcgggccgccctttccgagaggctcttcgccaacctgtgggggaggcttgagggggaggagaggctcctttggctttaccgggaggtggagaggcccctttccgctgtcctggcccacatggaggccacgggggtgcgcctggacgtggcctatctcagggccttgtccctggaggtggccgaggagatcgcccgcctcgaggccgaggtcttccgcctggccggccaccccttcaacctcaactcccgggaccagctggaaagggtcctctttgacgagctagggcttcccgccatcggcaagacggagaagaccggcaagcgctccaccagcgccgccgtcctggaggccctccgcgaggcccaccccatcgtggagaagatcctgcagtaccgggagctcaccaagctgaagagcacctacattgaccccttgccggacctcatccaccccaggacgggccgcctccacacccgcttcaaccagacggccacggccacgggcaggctaagtagctccgatcccaacctccagaacatccccgtccgcaccccgcttgggcagaggatccgccgggccttcatcgccgaggaggggtggctattggtggccctggactatagccagatagagctcagggtgctggcccacctctccggcgacgagaacctgatccgggtcttccaggaggggcgggacatccacacggagaccgccagctggatgttcggcgtcccccgggaggccgtggaccccctgatgcgccgggcggccaagaccatcaacttcggggtcctctacggcatgtcggcccaccgcctctcccaggagctagccatcccttacgaggaggcccaggccttcattgagcgctactttcagagcttccccaaggtgcgggcctggattgagaagaccctggaggagggcaggaggcgggggtacgtggagaccctcttcggccgccgcttttacgtgccagacctagaggcccgggtgaagagcgtgcgggaggcggccgagcgcatggccttcaacatgcccgtccagggcaccgccgccgacctcatgaagctggctatggtgaagctcttccccaggctggaggaaatgggggccaggatgctccttcaggtccacgacgagctggtcctcgaggccccaaaagagagggcggaggccgtggcccggctggccaaggaggtcatggagggggtgtatcccctggccgtgcccctggaggtggaggtggggataggggaggactggctctccgccaaggagtgataccaccccatgctggcccaagccagcatgggggccccggcaaaaggtttctggggaagttaccaggcatggtgggccgaaggaaacaggaaacaagggtatgagggttttttgccctaaagaaaggccagggggtcctcccgaaggaaggcttccagggggataccccctgggcccaggagtagcccctttcctccaaaggcctgggtgaaggcttttagccctttggtcctttgggaaggggcgcttttgacctccaaagccagaaggcgccttcccttcttcaagacgaagtcaacctcctggtccctttcccgccagtagtacacctcaaagcccccgtgggggccgtgggccagaaggtgggcgcccacggcggtttccacgagccgccccatgagggcggcgtccgcccacacctcctttggggaaagccccaagaccgccgtgatgagccccgtattaagggccaggagcttggggctcgaggcgcggcgccggaagggctcggcggcgtacttctgcag

SEQ ID NO: 3195 - DNA, 3026 bp, Artificial Sequence
  Description of Artificial Sequence: Synthetic DNA sequence of Thermus aquaticus DNA Polymerase R728S
atgagggggatgctgcccctctttgagcccaagggccgggtcctcctggtggacggccaccacctggcctaccgcaccttccacgccctgaagggcctcaccaccagccggggggagccggtgcaggcggtctacggcttcgccaagagcctcctcaaggccctcaaggaggacggggacgcggtgatcgtggtctttgacgccaaggccccctccttccgccacgaggcctacggggggtacaaggcgggccgggcccccacgccggaggactttccccggcaactcgccctcatcaaggagctggtggacctcctggggctggcgcgcctcgaggtcccgggctacgaggcggacgacgtcctggccagcctggccaagaaggcggaaaaggagggctacgaggtccgcatcctcaccgccgacaaagacctttaccagctcctttccgaccgcatccacgccctccaccccgaggggtacctcatcaccccggcctggctttgggaaaagtacggcctgaggcccgaccagtgggccgactaccgggccctgaccggggacgagtccgacaaccttcccggggtcaagggcatcggggagaagacggcgaggaagcttctggaggagtgggggagcctggaagccctcctcaagaacctggaccggctgaagcccgccatccgggagaagatcctggcccacatggacgatctgaagctctcctgggacctggccaaggtgcgcaccgacctgcccctggaggtggacttcgccaaaaggcgggagcccgaccgggagaggcttagggcctttctggagaggcttgagtttggcagcctcctccacgagttcggccttctggaaagccccaaggccctggaggaggccccctggcccccgccggaaggggccttcgtgggctttgtgctttcccgcaaggagcccatgtgggccgatcttctggccctggccgccgccagggggggccgggtccaccgggcccccgagccttataaagccctcagggacctgaaggaggcgcgggggcttctcgccaaagacctgagcgttctggccctgagggaaggccttggcctcccgcccggcgacgaccccatgctcctcgcctacctcctggacccttccaacaccacccccgagggggtggcccggcgctacggcggggagtggacggaggaggcgggggagcgggccgccctttccgagaggctcttcgccaacctgtgggggaggcttgagggggaggagaggctcctttggctttaccgggaggtggagaggcccctttccgctgtcctggcccacatggaggccacgggggtgcgcctggacgtggcctatctcagggccttgtccctggaggtggccgaggagatcgcccgcctcgaggccgaggtcttccgcctggccggccaccccttcaacctcaactcccgggaccagctggaaagggtcctctttgacgagctagggcttcccgccatcggcaagacggagaagaccggcaagcgctccaccagcgccgccgtcctggaggccctccgcgaggcccaccccatcgtggagaagatcctgcagtaccgggagctcaccaagctgaagagcacctacattgaccccttgccggacctcatccaccccaggacgggccgcctccacacccgcttcaaccagacggccacggccacgggcaggctaagtagctccgatcccaacctccagaacatccccgtccgcaccccgcttgggcagaggatccgccgggccttcatcgccgaggaggggtggctattggtggccctggactatagccagatagagctcagggtgctggcccacctctccggcgacgagaacctgatccgggtcttccaggaggggcgggacatccacacggagaccgccagctggatgttcggcgtcccccgggaggccgtggaccccctgatgcgccgggcggccaagaccatcaacttcggggtcctctacggcatgtcggcccaccgcctctcccaggagctagccatcccttacgaggaggcccaggccttcattgagcgctactttcagagcttccccaaggtgcgggcctggattgagaagaccctggaggagggcaggaggcgggggtacgtggagaccctcttcggccgccgctcttacgtgccagacctagaggcccgggtgaagagcgtgcgggaggcggccgagcgcatggccttcaacatgcccgtccagggcaccgccgccgacctcatgaagctggctatggtgaagctcttccccaggctggaggaaatgggggccaggatgctccttcaggtccacgacgagctggtcctcgaggccccaaaagagagggcggaggccgtggcccggctggccaaggaggtcatggagggggtgtatcccctggccgtgcccctggaggtggaggtggggataggggaggactggctctccgccaaggagtgataccaccccatgctggcccaagccagcatgggggccccggcaaaaggtttctggggaagttaccaggcatggtgggccgaaggaaacaggaaacaagggtatgagggttttttgccctaaagaaaggccagggggtcctcccgaaggaaggcttccagggggataccccctgggcccaggagtagcccctttcctccaaaggcctgggtgaaggcttttagccctttggtcctttgggaaggggcgcttttgacctccaaagccagaaggcgccttcccttcttcaagacgaagtcaacctcctggtccctttcccgccagtagtacacctcaaagcccccgtgggggccgtgggccagaaggtgggcgcccacggcggtttccacgagccgccccatgagggcggcgtccgcccacacctcctttggggaaagccccaagaccgccgtgatgagccccgtattaagggccaggagcttggggctcgaggcgcggcgccggaagggctcggcggcgtacttctgcag

SEQ ID NO: 3196 - DNA, 3026 bp, Artificial Sequence
  Description of Artificial Sequence: Synthetic DNA sequence of Thermus aquaticus DNA Polymerase R728Y
atgagggggatgctgcccctctttgagcccaagggccgggtcctcctggtggacggccaccacctggcctaccgcaccttccacgccctgaagggcctcaccaccagccggggggagccggtgcaggcggtctacggcttcgccaagagcctcctcaaggccctcaaggaggacggggacgcggtgatcgtggtctttgacgccaaggccccctccttccgccacgaggcctacggggggtacaaggcgggccgggcccccacgccggaggactttccccggcaactcgccctcatcaaggagctggtggacctcctggggctggcgcgcctcgaggtcccgggctacgaggcggacgacgtcctggccagcctggccaagaaggcggaaaaggagggctacgaggtccgcatcctcaccgccgacaaagacctttaccagctcctttccgaccgcatccacgccctccaccccgaggggtacctcatcaccccggcctggctttgggaaaagtacggcctgaggcccgaccagtgggccgactaccgggccctgaccggggacgagtccgacaaccttcccggggtcaagggcatcggggagaagacggcgaggaagcttctggaggagtgggggagcctggaagccctcctcaagaacctggaccggctgaagcccgccatccgggagaagatcctggcccacatggacgatctgaagctctcctgggacctggccaaggtgcgcaccgacctgcccctggaggtggacttcgccaaaaggcgggagcccgaccgggagaggcttagggcctttctggagaggcttgagtttggcagcctcctccacgagttcggccttctggaaagccccaaggccctggaggaggccccctggcccccgccggaaggggccttcgtgggctttgtgctttcccgcaaggagcccatgtgggccgatcttctggccctggccgccgccagggggggccgggtccaccgggcccccgagccttataaagccctcagggacctgaaggaggcgcgggggcttctcgccaaagacctgagcgttctggccctgagggaaggccttggcctcccgcccggcgacgaccccatgctcctcgcctacctcctggacccttccaacaccacccccgagggggtggcccggcgctacggcggggagtggacggaggaggcgggggagcgggccgccctttccgagaggctcttcgccaacctgtgggggaggcttgagggggaggagaggctcctttggctttaccgggaggtggagaggcccctttccgctgtcctggcccacatggaggccacgggggtgcgcctggacgtggcctatctcagggccttgtccctggaggtggccgaggagatcgcccgcctcgaggccgaggtcttccgcctggccggccaccccttcaacctcaactcccgggaccagctggaaagggtcctctttgacgagctagggcttcccgccatcggcaagacggagaagaccggcaagcgctccaccagcgccgccgtcctggaggccctccgcgaggcccaccccatcgtggagaagatcctgcagtaccgggagctcaccaagctgaagagcacctacattgaccccttgccggacctcatccaccccaggacgggccgcctccacacccgcttcaaccagacggccacggccacgggcaggctaagtagctccgatcccaacctccagaacatccccgtccgcaccccgcttgggcagaggatccgccgggccttcatcgccgaggaggggtggctattggtggccctggactatagccagatagagctcagggtgctggcccacctctccggcgacgagaacctgatccgggtcttccaggaggggcgggacatccacacggagaccgccagctggatgttcggcgtcccccgggaggccgtggaccccctgatgcgccgggcggccaagaccatcaacttcggggtcctctacggcatgtcggcccaccgcctctcccaggagctagccatcccttacgaggaggcccaggccttcattgagcgctactttcagagcttccccaaggtgcgggcctggattgagaagaccctggaggagggcaggaggcgggggtacgtggagaccctcttcggccgccgctattacgtgccagacctagaggcccgggtgaagagcgtgcgggaggcggccgagcgcatggccttcaacatgcccgtccagggcaccgccgccgacctcatgaagctggctatggtgaagctcttccccaggctggaggaaatgggggccaggatgctccttcaggtccacgacgagctggtcctcgaggccccaaaagagagggcggaggccgtggcccggctggccaaggaggtcatggagggggtgtatcccctggccgtgcccctggaggtggaggtggggataggggaggactggctctccgccaaggagtgataccaccccatgctggcccaagccagcatgggggccccggcaaaaggtttctggggaagttaccaggcatggtgggccgaaggaaacaggaaacaagggtatgagggttttttgccctaaagaaaggccagggggtcctcccgaaggaaggcttccagggggataccccctgggcccaggagtagcccctttcctccaaaggcctgggtgaaggcttttagccctttggtcctttgggaaggggcgcttttgacctccaaagccagaaggcgccttcccttcttcaagacgaagtcaacctcctggtccctttcccgccagtagtacacctcaaagcccccgtgggggccgtgggccagaaggtgggcgcccacggcggtttccacgagccgccccatgagggcggcgtccgcccacacctcctttggggaaagccccaagaccgccgtgatgagccccgtattaagggccaggagcttggggctcgaggcgcggcgccggaagggctcggcggcgtacttctgcag

SEQ ID NO: 3197 - DNA, 3026 bp, Artificial Sequence
  Description of Artificial Sequence: Synthetic DNA sequence of Thermus aquaticus DNA Polymerase R728W
atgagggggatgctgcccctctttgagcccaagggccgggtcctcctggtggacggccaccacctggcctaccgcaccttccacgccctgaagggcctcaccaccagccggggggagccggtgcaggcggtctacggcttcgccaagagcctcctcaaggccctcaaggaggacggggacgcggtgatcgtggtctttgacgccaaggccccctccttccgccacgaggcctacggggggtacaaggcgggccgggcccccacgccggaggactttccccggcaactcgccctcatcaaggagctggtggacctcctggggctggcgcgcctcgaggtcccgggctacgaggcggacgacgtcctggccagcctggccaagaaggcggaaaaggagggctacgaggtccgcatcctcaccgccgacaaagacctttaccagctcctttccgaccgcatccacgccctccaccccgaggggtacctcatcaccccggcctggctttgggaaaagtacggcctgaggcccgaccagtgggccgactaccgggccctgaccggggacgagtccgacaaccttcccggggtcaagggcatcggggagaagacggcgaggaagcttctggaggagtgggggagcctggaagccctcctcaagaacctggaccggctgaagcccgccatccgggagaagatcctggcccacatggacgatctgaagctctcctgggacctggccaaggtgcgcaccgacctgcccctggaggtggacttcgccaaaaggcgggagcccgaccgggagaggcttagggcctttctggagaggcttgagtttggcagcctcctccacgagttcggccttctggaaagccccaaggccctggaggaggccccctggcccccgccggaaggggccttcgtgggctttgtgctttcccgcaaggagcccatgtgggccgatcttctggccctggccgccgccagggggggccgggtccaccgggcccccgagccttataaagccctcagggacctgaaggaggcgcgggggcttctcgccaaagacctgagcgttctggccctgagggaaggccttggcctcccgcccggcgacgaccccatgctcctcgcctacctcctggacccttccaacaccacccccgagggggtggcccggcgctacggcggggagtggacggaggaggcgggggagcgggccgccctttccgagaggctcttcgccaacctgtgggggaggcttgagggggaggagaggctcctttggctttaccgggaggtggagaggcccctttccgctgtcctggcccacatggaggccacgggggtgcgcctggacgtggcctatctcagggccttgtccctggaggtggccgaggagatcgcccgcctcgaggccgaggtcttccgcctggccggccaccccttcaacctcaactcccgggaccagctggaaagggtcctctttgacgagctagggcttcccgccatcggcaagacggagaagaccggcaagcgctccaccagcgccgccgtcctggaggccctccgcgaggcccaccccatcgtggagaagatcctgcagtaccgggagctcaccaagctgaagagcacctacattgaccccttgccggacctcatccaccccaggacgggccgcctccacacccgcttcaaccagacggccacggccacgggcaggctaagtagctccgatcccaacctccagaacatccccgtccgcaccccgcttgggcagaggatccgccgggccttcatcgccgaggaggggtggctattggtggccctggactatagccagatagagctcagggtgctggcccacctctccggcgacgagaacctgatccgggtcttccaggaggggcgggacatccacacggagaccgccagctggatgttcggcgtcccccgggaggccgtggaccccctgatgcgccgggcggccaagaccatcaacttcggggtcctctacggcatgtcggcccaccgcctctcccaggagctagccatcccttacgaggaggcccaggccttcattgagcgctactttcagagcttccccaaggtgcgggcctggattgagaagaccctggaggagggcaggaggcgggggtacgtggagaccctcttcggccgccgctggtacgtgccagacctagaggcccgggtgaagagcgtgcgggaggcggccgagcgcatggccttcaacatgcccgtccagggcaccgccgccgacctcatgaagctggctatggtgaagctcttccccaggctggaggaaatgggggccaggatgctccttcaggtccacgacgagctggtcctcgaggccccaaaagagagggcggaggccgtggcccggctggccaaggaggtcatggagggggtgtatcccctggccgtgcccctggaggtggaggtggggataggggaggactggctctccgccaaggagtgataccaccccatgctggcccaagccagcatgggggccccggcaaaaggtttctggggaagttaccaggcatggtgggccgaaggaaacaggaaacaagggtatgagggttttttgccctaaagaaaggccagggggtcctcccgaaggaaggcttccagggggataccccctgggcccaggagtagcccctttcctccaaaggcctgggtgaaggcttttagccctttggtcctttgggaaggggcgcttttgacctccaaagccagaaggcgccttcccttcttcaagacgaagtcaacctcctggtccctttcccgccagtagtacacctcaaagcccccgtgggggccgtgggccagaaggtgggcgcccacggcggtttccacgagccgccccatgagggcggcgtccgcccacacctcctttggggaaagccccaagaccgccgtgatgagccccgtattaagggccaggagcttggggctcgaggcgcggcgccggaagggctcggcggcgtacttctgcag

SEQ ID NO: 3198 - DNA, 3026 bp, Artificial Sequence
  Description of Artificial Sequence: Synthetic DNA sequence of Thermus aquaticus DNA Polymerase R728P
atgagggggatgctgcccctctttgagcccaagggccgggtcctcctggtggacggccaccacctggcctaccgcaccttccacgccctgaagggcctcaccaccagccggggggagccggtgcaggcggtctacggcttcgccaagagcctcctcaaggccctcaaggaggacggggacgcggtgatcgtggtctttgacgccaaggccccctccttccgccacgaggcctacggggggtacaaggcgggccgggcccccacgccggaggactttccccggcaactcgccctcatcaaggagctggtggacctcctggggctggcgcgcctcgaggtcccgggctacgaggcggacgacgtcctggccagcctggccaagaaggcggaaaaggagggctacgaggtccgcatcctcaccgccgacaaagacctttaccagctcctttccgaccgcatccacgccctccaccccgaggggtacctcatcaccccggcctggctttgggaaaagtacggcctgaggcccgaccagtgggccgactaccgggccctgaccggggacgagtccgacaaccttcccggggtcaagggcatcggggagaagacggcgaggaagcttctggaggagtgggggagcctggaagccctcctcaagaacctggaccggctgaagcccgccatccgggagaagatcctggcccacatggacgatctgaagctctcctgggacctggccaaggtgcgcaccgacctgcccctggaggtggacttcgccaaaaggcgggagcccgaccgggagaggcttagggcctttctggagaggcttgagtttggcagcctcctccacgagttcggccttctggaaagccccaaggccctggaggaggccccctggcccccgccggaaggggccttcgtgggctttgtgctttcccgcaaggagcccatgtgggccgatcttctggccctggccgccgccagggggggccgggtccaccgggcccccgagccttataaagccctcagggacctgaaggaggcgcgggggcttctcgccaaagacctgagcgttctggccctgagggaaggccttggcctcccgcccggcgacgaccccatgctcctcgcctacctcctggacccttccaacaccacccccgagggggtggcccggcgctacggcggggagtggacggaggaggcgggggagcgggccgccctttccgagaggctcttcgccaacctgtgggggaggcttgagggggaggagaggctcctttggctttaccgggaggtggagaggcccctttccgctgtcctggcccacatggaggccacgggggtgcgcctggacgtggcctatctcagggccttgtccctggaggtggccgaggagatcgcccgcctcgaggccgaggtcttccgcctggccggccaccccttcaacctcaactcccgggaccagctggaaagggtcctctttgacgagctagggcttcccgccatcggcaagacggagaagaccggcaagcgctccaccagcgccgccgtcctggaggccctccgcgaggcccaccccatcgtggagaagatcctgcagtaccgggagctcaccaagctgaagagcacctacattgaccccttgccggacctcatccaccccaggacgggccgcctccacacccgcttcaaccagacggccacggccacgggcaggctaagtagctccgatcccaacctccagaacatccccgtccgcaccccgcttgggcagaggatccgccgggccttcatcgccgaggaggggtggctattggtggccctggactatagccagatagagctcagggtgctggcccacctctccggcgacgagaacctgatccgggtcttccaggaggggcgggacatccacacggagaccgccagctggatgttcggcgtcccccgggaggccgtggaccccctgatgcgccgggcggccaagaccatcaacttcggggtcctctacggcatgtcggcccaccgcctctcccaggagctagccatcccttacgaggaggcccaggccttcattgagcgctactttcagagcttccccaaggtgcgggcctggattgagaagaccctggaggagggcaggaggcgggggtacgtggagaccctcttcggccgccgcccttacgtgccagacctagaggcccgggtgaagagcgtgcgggaggcggccgagcgcatggccttcaacatgcccgtccagggcaccgccgccgacctcatgaagctggctatggtgaagctcttccccaggctggaggaaatgggggccaggatgctccttcaggtccacgacgagctggtcctcgaggccccaaaagagagggcggaggccgtggcccggctggccaaggaggtcatggagggggtgtatcccctggccgtgcccctggaggtggaggtggggataggggaggactggctctccgccaaggagtgataccaccccatgctggcccaagccagcatgggggccccggcaaaaggtttctggggaagttaccaggcatggtgggccgaaggaaacaggaaacaagggtatgagggttttttgccctaaagaaaggccagggggtcctcccgaaggaaggcttccagggggataccccctgggcccaggagtagcccctttcctccaaaggcctgggtgaaggcttttagccctttggtcctttgggaaggggcgcttttgacctccaaagccagaaggcgccttcccttcttcaagacgaagtcaacctcctggtccctttcccgccagtagtacacctcaaagcccccgtgggggccgtgggccagaaggtgggcgcccacggcggtttccacgagccgccccatgagggcggcgtccgcccacacctcctttggggaaagccccaagaccgccgtgatgagccccgtattaagggccaggagcttggggctcgaggcgcggcgccggaagggctcggcggcgtacttctgcag

SEQ ID NO: 3199 - DNA, 3026 bp, Artificial Sequence
  Description of Artificial Sequence: Synthetic DNA sequence of Thermus aquaticus DNA Polymerase R728M
atgagggggatgctgcccctctttgagcccaagggccgggtcctcctggtggacggccaccacctggcctaccgcaccttccacgccctgaagggcctcaccaccagccggggggagccggtgcaggcggtctacggcttcgccaagagcctcctcaaggccctcaaggaggacggggacgcggtgatcgtggtctttgacgccaaggccccctccttccgccacgaggcctacggggggtacaaggcgggccgggcccccacgccggaggactttccccggcaactcgccctcatcaaggagctggtggacctcctggggctggcgcgcctcgaggtcccgggctacgaggcggacgacgtcctggccagcctggccaagaaggcggaaaaggagggctacgaggtccgcatcctcaccgccgacaaagacctttaccagctcctttccgaccgcatccacgccctccaccccgaggggtacctcatcaccccggcctggctttgggaaaagtacggcctgaggcccgaccagtgggccgactaccgggccctgaccggggacgagtccgacaaccttcccggggtcaagggcatcggggagaagacggcgaggaagcttctggaggagtgggggagcctggaagccctcctcaagaacctggaccggctgaagcccgccatccgggagaagatcctggcccacatggacgatctgaagctctcctgggacctggccaaggtgcgcaccgacctgcccctggaggtggacttcgccaaaaggcgggagcccgaccgggagaggcttagggcctttctggagaggcttgagtttggcagcctcctccacgagttcggccttctggaaagccccaaggccctggaggaggccccctggcccccgccggaaggggccttcgtgggctttgtgctttcccgcaaggagcccatgtgggccgatcttctggccctggccgccgccagggggggccgggtccaccgggcccccgagccttataaagccctcagggacctgaaggaggcgcgggggcttctcgccaaagacctgagcgttctggccctgagggaaggccttggcctcccgcccggcgacgaccccatgctcctcgcctacctcctggacccttccaacaccacccccgagggggtggcccggcgctacggcggggagtggacggaggaggcgggggagcgggccgccctttccgagaggctcttcgccaacctgtgggggaggcttgagggggaggagaggctcctttggctttaccgggaggtggagaggcccctttccgctgtcctggcccacatggaggccacgggggtgcgcctggacgtggcctatctcagggccttgtccctggaggtggccgaggagatcgcccgcctcgaggccgaggtcttccgcctggccggccaccccttcaacctcaactcccgggaccagctggaaagggtcctctttgacgagctagggcttcccgccatcggcaagacggagaagaccggcaagcgctccaccagcgccgccgtcctggaggccctccgcgaggcccaccccatcgtggagaagatcctgcagtaccgggagctcaccaagctgaagagcacctacattgaccccttgccggacctcatccaccccaggacgggccgcctccacacccgcttcaaccagacggccacggccacgggcaggctaagtagctccgatcccaacctccagaacatccccgtccgcaccccgcttgggcagaggatccgccgggccttcatcgccgaggaggggtggctattggtggccctggactatagccagatagagctcagggtgctggcccacctctccggcgacgagaacctgatccgggtcttccaggaggggcgggacatccacacggagaccgccagctggatgttcggcgtcccccgggaggccgtggaccccctgatgcgccgggcggccaagaccatcaacttcggggtcctctacggcatgtcggcccaccgcctctcccaggagctagccatcccttacgaggaggcccaggccttcattgagcgctactttcagagcttccccaaggtgcgggcctggattgagaagaccctggaggagggcaggaggcgggggtacgtggagaccctcttcggccgccgcatgtacgtgccagacctagaggcccgggtgaagagcgtgcgggaggcggccgagcgcatggccttcaacatgcccgtccagggcaccgccgccgacctcatgaagctggctatggtgaagctcttccccaggctggaggaaatgggggccaggatgctccttcaggtccacgacgagctggtcctcgaggccccaaaagagagggcggaggccgtggcccggctggccaaggaggtcatggagggggtgtatcccctggccgtgcccctggaggtggaggtggggataggggaggactggctctccgccaaggagtgataccaccccatgctggcccaagccagcatgggggccccggcaaaaggtttctggggaagttaccaggcatggtgggccgaaggaaacaggaaacaagggtatgagggttttttgccctaaagaaaggccagggggtcctcccgaaggaaggcttccagggggataccccctgggcccaggagtagcccctttcctccaaaggcctgggtgaaggcttttagccctttggtcctttgggaaggggcgcttttgacctccaaagccagaaggcgccttcccttcttcaagacgaagtcaacctcctggtccctttcccgccagtagtacacctcaaagcccccgtgggggccgtgggccagaaggtgggcgcccacggcggtttccacgagccgccccatgagggcggcgtccgcccacacctcctttggggaaagccccaagaccgccgtgatgagccccgtattaagggccaggagcttggggctcgaggcgcggcgccggaagggctcggcggcgtacttctgcag

SEQ ID NO: 3200 - DNA, 3026 bp, Artificial Sequence
  Description of Artificial Sequence: Synthetic DNA sequence of Thermus aquaticus DNA Polymerase R728T
atgagggggatgctgcccctctttgagcccaagggccgggtcctcctggtggacggccaccacctggcctaccgcaccttccacgccctgaagggcctcaccaccagccggggggagccggtgcaggcggtctacggcttcgccaagagcctcctcaaggccctcaaggaggacggggacgcggtgatcgtggtctttgacgccaaggccccctccttccgccacgaggcctacggggggtacaaggcgggccgggcccccacgccggaggactttccccggcaactcgccctcatcaaggagctggtggacctcctggggctggcgcgcctcgaggtcccgggctacgaggcggacgacgtcctggccagcctggccaagaaggcggaaaaggagggctacgaggtccgcatcctcaccgccgacaaagacctttaccagctcctttccgaccgcatccacgccctccaccccgaggggtacctcatcaccccggcctggctttgggaaaagtacggcctgaggcccgaccagtgggccgactaccgggccctgaccggggacgagtccgacaaccttcccggggtcaagggcatcggggagaagacggcgaggaagcttctggaggagtgggggagcctggaagccctcctcaagaacctggaccggctgaagcccgccatccgggagaagatcctggcccacatggacgatctgaagctctcctgggacctggccaaggtgcgcaccgacctgcccctggaggtggacttcgccaaaaggcgggagcccgaccgggagaggcttagggcctttctggagaggcttgagtttggcagcctcctccacgagttcggccttctggaaagccccaaggccctggaggaggccccctggcccccgccggaaggggccttcgtgggctttgtgctttcccgcaaggagcccatgtgggccgatcttctggccctggccgccgccagggggggccgggtccaccgggcccccgagccttataaagccctcagggacctgaaggaggcgcgggggcttctcgccaaagacctgagcgttctggccctgagggaaggccttggcctcccgcccggcgacgaccccatgctcctcgcctacctcctggacccttccaacaccacccccgagggggtggcccggcgctacggcggggagtggacggaggaggcgggggagcgggccgccctttccgagaggctcttcgccaacctgtgggggaggcttgagggggaggagaggctcctttggctttaccgggaggtggagaggcccctttccgctgtcctggcccacatggaggccacgggggtgcgcctggacgtggcctatctcagggccttgtccctggaggtggccgaggagatcgcccgcctcgaggccgaggtcttccgcctggccggccaccccttcaacctcaactcccgggaccagctggaaagggtcctctttgacgagctagggcttcccgccatcggcaagacggagaagaccggcaagcgctccaccagcgccgccgtcctggaggccctccgcgaggcccaccccatcgtggagaagatcctgcagtaccgggagctcaccaagctgaagagcacctacattgaccccttgccggacctcatccaccccaggacgggccgcctccacacccgcttcaaccagacggccacggccacgggcaggctaagtagctccgatcccaacctccagaacatccccgtccgcaccccgcttgggcagaggatccgccgggccttcatcgccgaggaggggtggctattggtggccctggactatagccagatagagctcagggtgctggcccacctctccggcgacgagaacctgatccgggtcttccaggaggggcgggacatccacacggagaccgccagctggatgttcggcgtcccccgggaggccgtggaccccctgatgcgccgggcggccaagaccatcaacttcggggtcctctacggcatgtcggcccaccgcctctcccaggagctagccatcccttacgaggaggcccaggccttcattgagcgctactttcagagcttccccaaggtgcgggcctggattgagaagaccctggaggagggcaggaggcgggggtacgtggagaccctcttcggccgccgcacttacgtgccagacctagaggcccgggtgaagagcgtgcgggaggcggccgagcgcatggccttcaacatgcccgtccagggcaccgccgccgacctcatgaagctggctatggtgaagctcttccccaggctggaggaaatgggggccaggatgctccttcaggtccacgacgagctggtcctcgaggccccaaaagagagggcggaggccgtggcccggctggccaaggaggtcatggagggggtgtatcccctggccgtgcccctggaggtggaggtggggataggggaggactggctctccgccaaggagtgataccaccccatgctggcccaagccagcatgggggccccggcaaaaggtttctggggaagttaccaggcatggtgggccgaaggaaacaggaaacaagggtatgagggttttttgccctaaagaaaggccagggggtcctcccgaaggaaggcttccagggggataccccctgggcccaggagtagcccctttcctccaaaggcctgggtgaaggcttttagccctttggtcctttgggaaggggcgcttttgacctccaaagccagaaggcgccttcccttcttcaagacgaagtcaacctcctggtccctttcccgccagtagtacacctcaaagcccccgtgggggccgtgggccagaaggtgggcgcccacggcggtttccacgagccgccccatgagggcggcgtccgcccacacctcctttggggaaagccccaagaccgccgtgatgagccccgtattaagggccaggagcttggggctcgaggcgcggcgccggaagggctcggcggcgtacttctgcag

SEQ ID NO: 3201 - DNA, 3026 bp, Artificial Sequence
  Description of Artificial Sequence: Synthetic DNA sequence of Thermus aquaticus DNA Polymerase R728N
atgagggggatgctgcccctctttgagcccaagggccgggtcctcctggtggacggccaccacctggcctaccgcaccttccacgccctgaagggcctcaccaccagccggggggagccggtgcaggcggtctacggcttcgccaagagcctcctcaaggccctcaaggaggacggggacgcggtgatcgtggtctttgacgccaaggccccctccttccgccacgaggcctacggggggtacaaggcgggccgggcccccacgccggaggactttccccggcaactcgccctcatcaaggagctggtggacctcctggggctggcgcgcctcgaggtcccgggctacgaggcggacgacgtcctggccagcctggccaagaaggcggaaaaggagggctacgaggtccgcatcctcaccgccgacaaagacctttaccagctcctttccgaccgcatccacgccctccaccccgaggggtacctcatcaccccggcctggctttgggaaaagtacggcctgaggcccgaccagtgggccgactaccgggccctgaccggggacgagtccgacaaccttcccggggtcaagggcatcggggagaagacggcgaggaagcttctggaggagtgggggagcctggaagccctcctcaagaacctggaccggctgaagcccgccatccgggagaagatcctggcccacatggacgatctgaagctctcctgggacctggccaaggtgcgcaccgacctgcccctggaggtggacttcgccaaaaggcgggagcccgaccgggagaggcttagggcctttctggagaggcttgagtttggcagcctcctccacgagttcggccttctggaaagccccaaggccctggaggaggccccctggcccccgccggaaggggccttcgtgggctttgtgctttcccgcaaggagcccatgtgggccgatcttctggccctggccgccgccagggggggccgggtccaccgggcccccgagccttataaagccctcagggacctgaaggaggcgcgggggcttctcgccaaagacctgagcgttctggccctgagggaaggccttggcctcccgcccggcgacgaccccatgctcctcgcctacctcctggacccttccaacaccacccccgagggggtggcccggcgctacggcggggagtggacggaggaggcgggggagcgggccgccctttccgagaggctcttcgccaacctgtgggggaggcttgagggggaggagaggctcctttggctttaccgggaggtggagaggcccctttccgctgtcctggcccacatggaggccacgggggtgcgcctggacgtggcctatctcagggccttgtccctggaggtggccgaggagatcgcccgcctcgaggccgaggtcttccgcctggccggccaccccttcaacctcaactcccgggaccagctggaaagggtcctctttgacgagctagggcttcccgccatcggcaagacggagaagaccggcaagcgctccaccagcgccgccgtcctggaggccctccgcgaggcccaccccatcgtggagaagatcctgcagtaccgggagctcaccaagctgaagagcacctacattgaccccttgccggacctcatccaccccaggacgggccgcctccacacccgcttcaaccagacggccacggccacgggcaggctaagtagctccgatcccaacctccagaacatccccgtccgcaccccgcttgggcagaggatccgccgggccttcatcgccgaggaggggtggctattggtggccctggactatagccagatagagctcagggtgctggcccacctctccggcgacgagaacctgatccgggtcttccaggaggggcgggacatccacacggagaccgccagctggatgttcggcgtcccccgggaggccgtggaccccctgatgcgccgggcggccaagaccatcaacttcggggtcctctacggcatgtcggcccaccgcctctcccaggagctagccatcccttacgaggaggcccaggccttcattgagcgctactttcagagcttccccaaggtgcgggcctggattgagaagaccctggaggagggcaggaggcgggggtacgtggagaccctcttcggccgccgcaattacgtgccagacctagaggcccgggtgaagagcgtgcgggaggcggccgagcgcatggccttcaacatgcccgtccagggcaccgccgccgacctcatgaagctggctatggtgaagctcttccccaggctggaggaaatgggggccaggatgctccttcaggtccacgacgagctggtcctcgaggccccaaaagagagggcggaggccgtggcccggctggccaaggaggtcatggagggggtgtatcccctggccgtgcccctggaggtggaggtggggataggggaggactggctctccgccaaggagtgataccaccccatgctggcccaagccagcatgggggccccggcaaaaggtttctggggaagttaccaggcatggtgggccgaaggaaacaggaaacaagggtatgagggttttttgccctaaagaaaggccagggggtcctcccgaaggaaggcttccagggggataccccctgggcccaggagtagcccctttcctccaaaggcctgggtgaaggcttttagccctttggtcctttgggaaggggcgcttttgacctccaaagccagaaggcgccttcccttcttcaagacgaagtcaacctcctggtccctttcccgccagtagtacacctcaaagcccccgtgggggccgtgggccagaaggtgggcgcccacggcggtttccacgagccgccccatgagggcggcgtccgcccacacctcctttggggaaagccccaagaccgccgtgatgagccccgtattaagggccaggagcttggggctcgaggcgcggcgccggaagggctcggcggcgtacttctgcag

SEQ ID NO: 3202 - DNA, 3026 bp, Artificial Sequence
  Description of Artificial Sequence: Synthetic DNA sequence of Thermus aquaticus DNA Polymerase R728V
atgagggggatgctgcccctctttgagcccaagggccgggtcctcctggtggacggccaccacctggcctaccgcaccttccacgccctgaagggcctcaccaccagccggggggagccggtgcaggcggtctacggcttcgccaagagcctcctcaaggccctcaaggaggacggggacgcggtgatcgtggtctttgacgccaaggccccctccttccgccacgaggcctacggggggtacaaggcgggccgggcccccacgccggaggactttccccggcaactcgccctcatcaaggagctggtggacctcctggggctggcgcgcctcgaggtcccgggctacgaggcggacgacgtcctggccagcctggccaagaaggcggaaaaggagggctacgaggtccgcatcctcaccgccgacaaagacctttaccagctcctttccgaccgcatccacgccctccaccccgaggggtacctcatcaccccggcctggctttgggaaaagtacggcctgaggcccgaccagtgggccgactaccgggccctgaccggggacgagtccgacaaccttcccggggtcaagggcatcggggagaagacggcgaggaagcttctggaggagtgggggagcctggaagccctcctcaagaacctggaccggctgaagcccgccatccgggagaagatcctggcccacatggacgatctgaagctctcctgggacctggccaaggtgcgcaccgacctgcccctggaggtggacttcgccaaaaggcgggagcccgaccgggagaggcttagggcctttctggagaggcttgagtttggcagcctcctccacgagttcggccttctggaaagccccaaggccctggaggaggccccctggcccccgccggaaggggccttcgtgggctttgtgctttcccgcaaggagcccatgtgggccgatcttctggccctggccgccgccagggggggccgggtccaccgggcccccgagccttataaagccctcagggacctgaaggaggcgcgggggcttctcgccaaagacctgagcgttctggccctgagggaaggccttggcctcccgcccggcgacgaccccatgctcctcgcctacctcctggacccttccaacaccacccccgagggggtggcccggcgctacggcggggagtggacggaggaggcgggggagcgggccgccctttccgagaggctcttcgccaacctgtgggggaggcttgagggggaggagaggctcctttggctttaccgggaggtggagaggcccctttccgctgtcctggcccacatggaggccacgggggtgcgcctggacgtggcctatctcagggccttgtccctggaggtggccgaggagatcgcccgcctcgaggccgaggtcttccgcctggccggccaccccttcaacctcaactcccgggaccagctggaaagggtcctctttgacgagctagggcttcccgccatcggcaagacggagaagaccggcaagcgctccaccagcgccgccgtcctggaggccctccgcgaggcccaccccatcgtggagaagatcctgcagtaccgggagctcaccaagctgaagagcacctacattgaccccttgccggacctcatccaccccaggacgggccgcctccacacccgcttcaaccagacggccacggccacgggcaggctaagtagctccgatcccaacctccagaacatccccgtccgcaccccgcttgggcagaggatccgccgggccttcatcgccgaggaggggtggctattggtggccctggactatagccagatagagctcagggtgctggcccacctctccggcgacgagaacctgatccgggtcttccaggaggggcgggacatccacacggagaccgccagctggatgttcggcgtcccccgggaggccgtggaccccctgatgcgccgggcggccaagaccatcaacttcggggtcctctacggcatgtcggcccaccgcctctcccaggagctagccatcccttacgaggaggcccaggccttcattgagcgctactttcagagcttccccaaggtgcgggcctggattgagaagaccctggaggagggcaggaggcgggggtacgtggagaccctcttcggccgccgcgtctacgtgccagacctagaggcccgggtgaagagcgtgcgggaggcggccgagcgcatggccttcaacatgcccgtccagggcaccgccgccgacctcatgaagctggctatggtgaagctcttccccaggctggaggaaatgggggccaggatgctccttcaggtccacgacgagctggtcctcgaggccccaaaagagagggcggaggccgtggcccggctggccaaggaggtcatggagggggtgtatcccctggccgtgcccctggaggtggaggtggggataggggaggactggctctccgccaaggagtgataccaccccatgctggcccaagccagcatgggggccccggcaaaaggtttctggggaagttaccaggcatggtgggccgaaggaaacaggaaacaagggtatgagggttttttgccctaaagaaaggccagggggtcctcccgaaggaaggcttccagggggataccccctgggcccaggagtagcccctttcctccaaaggcctgggtgaaggcttttagccctttggtcctttgggaaggggcgcttttgacctccaaagccagaaggcgccttcccttcttcaagacgaagtcaacctcctggtccctttcccgccagtagtacacctcaaagcccccgtgggggccgtgggccagaaggtgggcgcccacggcggtttccacgagccgccccatgagggcggcgtccgcccacacctcctttggggaaagccccaagaccgccgtgatgagccccgtattaagggccaggagcttggggctcgaggcgcggcgccggaagggctcggcggcgtacttctgcag

SEQ ID NO: 3203 - DNA, 3026 bp, Artificial Sequence
  Description of Artificial Sequence: Synthetic DNA sequence of Thermus aquaticus DNA Polymerase Y729A
atgagggggatgctgcccctctttgagcccaagggccgggtcctcctggtggacggccaccacctggcctaccgcaccttccacgccctgaagggcctcaccaccagccggggggagccggtgcaggcggtctacggcttcgccaagagcctcctcaaggccctcaaggaggacggggacgcggtgatcgtggtctttgacgccaaggccccctccttccgccacgaggcctacggggggtacaaggcgggccgggcccccacgccggaggactttccccggcaactcgccctcatcaaggagctggtggacctcctggggctggcgcgcctcgaggtcccgggctacgaggcggacgacgtcctggccagcctggccaagaaggcggaaaaggagggctacgaggtccgcatcctcaccgccgacaaagacctttaccagctcctttccgaccgcatccacgccctccaccccgaggggtacctcatcaccccggcctggctttgggaaaagtacggcctgaggcccgaccagtgggccgactaccgggccctgaccggggacgagtccgacaaccttcccggggtcaagggcatcggggagaagacggcgaggaagcttctggaggagtgggggagcctggaagccctcctcaagaacctggaccggctgaagcccgccatccgggagaagatcctggcccacatggacgatctgaagctctcctgggacctggccaaggtgcgcaccgacctgcccctggaggtggacttcgccaaaaggcgggagcccgaccgggagaggcttagggcctttctggagaggcttgagtttggcagcctcctccacgagttcggccttctggaaagccccaaggccctggaggaggccccctggcccccgccggaaggggccttcgtgggctttgtgctttcccgcaaggagcccatgtgggccgatcttctggccctggccgccgccagggggggccgggtccaccgggcccccgagccttataaagccctcagggacctgaaggaggcgcgggggcttctcgccaaagacctgagcgttctggccctgagggaaggccttggcctcccgcccggcgacgaccccatgctcctcgcctacctcctggacccttccaacaccacccccgagggggtggcccggcgctacggcggggagtggacggaggaggcgggggagcgggccgccctttccgagaggctcttcgccaacctgtgggggaggcttgagggggaggagaggctcctttggctttaccgggaggtggagaggcccctttccgctgtcctggcccacatggaggccacgggggtgcgcctggacgtggcctatctcagggccttgtccctggaggtggccgaggagatcgcccgcctcgaggccgaggtcttccgcctggccggccaccccttcaacctcaactcccgggaccagctggaaagggtcctctttgacgagctagggcttcccgccatcggcaagacggagaagaccggcaagcgctccaccagcgccgccgtcctggaggccctccgcgaggcccaccccatcgtggagaagatcctgcagtaccgggagctcaccaagctgaagagcacctacattgaccccttgccggacctcatccaccccaggacgggccgcctccacacccgcttcaaccagacggccacggccacgggcaggctaagtagctccgatcccaacctccagaacatccccgtccgcaccccgcttgggcagaggatccgccgggccttcatcgccgaggaggggtggctattggtggccctggactatagccagatagagctcagggtgctggcccacctctccggcgacgagaacctgatccgggtcttccaggaggggcgggacatccacacggagaccgccagctggatgttcggcgtcccccgggaggccgtggaccccctgatgcgccgggcggccaagaccatcaacttcggggtcctctacggcatgtcggcccaccgcctctcccaggagctagccatcccttacgaggaggcccaggccttcattgagcgctactttcagagcttccccaaggtgcgggcctggattgagaagaccctggaggagggcaggaggcgggggtacgtggagaccctcttcggccgccgccgcgctgtgccagacctagaggcccgggtgaagagcgtgcgggaggcggccgagcgcatggccttcaacatgcccgtccagggcaccgccgccgacctcatgaagctggctatggtgaagctcttccccaggctggaggaaatgggggccaggatgctccttcaggtccacgacgagctggtcctcgaggccccaaaagagagggcggaggccgtggcccggctggccaaggaggtcatggagggggtgtatcccctggccgtgcccctggaggtggaggtggggataggggaggactggctctccgccaaggagtgataccaccccatgctggcccaagccagcatgggggccccggcaaaaggtttctggggaagttaccaggcatggtgggccgaaggaaacaggaaacaagggtatgagggttttttgccctaaagaaaggccagggggtcctcccgaaggaaggcttccagggggataccccctgggcccaggagtagcccctttcctccaaaggcctgggtgaaggcttttagccctttggtcctttgggaaggggcgcttttgacctccaaagccagaaggcgccttcccttcttcaagacgaagtcaacctcctggtccctttcccgccagtagtacacctcaaagcccccgtgggggccgtgggccagaaggtgggcgcccacggcggtttccacgagccgccccatgagggcggcgtccgcccacacctcctttggggaaagccccaagaccgccgtgatgagccccgtattaagggccaggagcttggggctcgaggcgcggcgccggaagggctcggcggcgtacttctgcag

SEQ ID NO: 3204 - DNA, 3026 bp, Artificial Sequence
  Description of Artificial Sequence: Synthetic DNA sequence of Thermus aquaticus DNA Polymerase Y729R
atgagggggatgctgcccctctttgagcccaagggccgggtcctcctggtggacggccaccacctggcctaccgcaccttccacgccctgaagggcctcaccaccagccggggggagccggtgcaggcggtctacggcttcgccaagagcctcctcaaggccctcaaggaggacggggacgcggtgatcgtggtctttgacgccaaggccccctccttccgccacgaggcctacggggggtacaaggcgggccgggcccccacgccggaggactttccccggcaactcgccctcatcaaggagctggtggacctcctggggctggcgcgcctcgaggtcccgggctacgaggcggacgacgtcctggccagcctggccaagaaggcggaaaaggagggctacgaggtccgcatcctcaccgccgacaaagacctttaccagctcctttccgaccgcatccacgccctccaccccgaggggtacctcatcaccccggcctggctttgggaaaagtacggcctgaggcccgaccagtgggccgactaccgggccctgaccggggacgagtccgacaaccttcccggggtcaagggcatcggggagaagacggcgaggaagcttctggaggagtgggggagcctggaagccctcctcaagaacctggaccggctgaagcccgccatccgggagaagatcctggcccacatggacgatctgaagctctcctgggacctggccaaggtgcgcaccgacctgcccctggaggtggacttcgccaaaaggcgggagcccgaccgggagaggcttagggcctttctggagaggcttgagtttggcagcctcctccacgagttcggccttctggaaagccccaaggccctggaggaggccccctggcccccgccggaaggggccttcgtgggctttgtgctttcccgcaaggagcccatgtgggccgatcttctggccctggccgccgccagggggggccgggtccaccgggcccccgagccttataaagccctcagggacctgaaggaggcgcgggggcttctcgccaaagacctgagcgttctggccctgagggaaggccttggcctcccgcccggcgacgaccccatgctcctcgcctacctcctggacccttccaacaccacccccgagggggtggcccggcgctacggcggggagtggacggaggaggcgggggagcgggccgccctttccgagaggctcttcgccaacctgtgggggaggcttgagggggaggagaggctcctttggctttaccgggaggtggagaggcccctttccgctgtcctggcccacatggaggccacgggggtgcgcctggacgtggcctatctcagggccttgtccctggaggtggccgaggagatcgcccgcctcgaggccgaggtcttccgcctggccggccaccccttcaacctcaactcccgggaccagctggaaagggtcctctttgacgagctagggcttcccgccatcggcaagacggagaagaccggcaagcgctccaccagcgccgccgtcctggaggccctccgcgaggcccaccccatcgtggagaagatcctgcagtaccgggagctcaccaagctgaagagcacctacattgaccccttgccggacctcatccaccccaggacgggccgcctccacacccgcttcaaccagacggccacggccacgggcaggctaagtagctccgatcccaacctccagaacatccccgtccgcaccccgcttgggcagaggatccgccgggccttcatcgccgaggaggggtggctattggtggccctggactatagccagatagagctcagggtgctggcccacctctccggcgacgagaacctgatccgggtcttccaggaggggcgggacatccacacggagaccgccagctggatgttcggcgtcccccgggaggccgtggaccccctgatgcgccgggcggccaagaccatcaacttcggggtcctctacggcatgtcggcccaccgcctctcccaggagctagccatcccttacgaggaggcccaggccttcattgagcgctactttcagagcttccccaaggtgcgggcctggattgagaagaccctggaggagggcaggaggcgggggtacgtggagaccctcttcggccgccgccgccgagtgccagacctagaggcccgggtgaagagcgtgcgggaggcggccgagcgcatggccttcaacatgcccgtccagggcaccgccgccgacctcatgaagctggctatggtgaagctcttccccaggctggaggaaatgggggccaggatgctccttcaggtccacgacgagctggtcctcgaggccccaaaagagagggcggaggccgtggcccggctggccaaggaggtcatggagggggtgtatcccctggccgtgcccctggaggtggaggtggggataggggaggactggctctccgccaaggagtgataccaccccatgctggcccaagccagcatgggggccccggcaaaaggtttctggggaagttaccaggcatggtgggccgaaggaaacaggaaacaagggtatgagggttttttgccctaaagaaaggccagggggtcctcccgaaggaaggcttccagggggataccccctgggcccaggagtagcccctttcctccaaaggcctgggtgaaggcttttagccctttggtcctttgggaaggggcgcttttgacctccaaagccagaaggcgccttcccttcttcaagacgaagtcaacctcctggtccctttcccgccagtagtacacctcaaagcccccgtgggggccgtgggccagaaggtgggcgcccacggcggtttccacgagccgccccatgagggcggcgtccgcccacacctcctttggggaaagccccaagaccgccgtgatgagccccgtattaagggccaggagcttggggctcgaggcgcggcgccggaagggctcggcggcgtacttctgcag

SEQ ID NO: 3205 - DNA, 3026 bp, Artificial Sequence
  Description of Artificial Sequence: Synthetic DNA sequence of Thermus aquaticus DNA Polymerase Y729C
atgagggggatgctgcccctctttgagcccaagggccgggtcctcctggtggacggccaccacctggcctaccgcaccttccacgccctgaagggcctcaccaccagccggggggagccggtgcaggcggtctacggcttcgccaagagcctcctcaaggccctcaaggaggacggggacgcggtgatcgtggtctttgacgccaaggccccctccttccgccacgaggcctacggggggtacaaggcgggccgggcccccacgccggaggactttccccggcaactcgccctcatcaaggagctggtggacctcctggggctggcgcgcctcgaggtcccgggctacgaggcggacgacgtcctggccagcctggccaagaaggcggaaaaggagggctacgaggtccgcatcctcaccgccgacaaagacctttaccagctcctttccgaccgcatccacgccctccaccccgaggggtacctcatcaccccggcctggctttgggaaaagtacggcctgaggcccgaccagtgggccgactaccgggccctgaccggggacgagtccgacaaccttcccggggtcaagggcatcggggagaagacggcgaggaagcttctggaggagtgggggagcctggaagccctcctcaagaacctggaccggctgaagcccgccatccgggagaagatcctggcccacatggacgatctgaagctctcctgggacctggccaaggtgcgcaccgacctgcccctggaggtggacttcgccaaaaggcgggagcccgaccgggagaggcttagggcctttctggagaggcttgagtttggcagcctcctccacgagttcggccttctggaaagccccaaggccctggaggaggccccctggcccccgccggaaggggccttcgtgggctttgtgctttcccgcaaggagcccatgtgggccgatcttctggccctggccgccgccagggggggccgggtccaccgggcccccgagccttataaagccctcagggacctgaaggaggcgcgggggcttctcgccaaagacctgagcgttctggccctgagggaaggccttggcctcccgcccggcgacgaccccatgctcctcgcctacctcctggacccttccaacaccacccccgagggggtggcccggcgctacggcggggagtggacggaggaggcgggggagcgggccgccctttccgagaggctcttcgccaacctgtgggggaggcttgagggggaggagaggctcctttggctttaccgggaggtggagaggcccctttccgctgtcctggcccacatggaggccacgggggtgcgcctggacgtggcctatctcagggccttgtccctggaggtggccgaggagatcgcccgcctcgaggccgaggtcttccgcctggccggccaccccttcaacctcaactcccgggaccagctggaaagggtcctctttgacgagctagggcttcccgccatcggcaagacggagaagaccggcaagcgctccaccagcgccgccgtcctggaggccctccgcgaggcccaccccatcgtggagaagatcctgcagtaccgggagctcaccaagctgaagagcacctacattgaccccttgccggacctcatccaccccaggacgggccgcctccacacccgcttcaaccagacggccacggccacgggcaggctaagtagctccgatcccaacctccagaacatccccgtccgcaccccgcttgggcagaggatccgccgggccttcatcgccgaggaggggtggctattggtggccctggactatagccagatagagctcagggtgctggcccacctctccggcgacgagaacctgatccgggtcttccaggaggggcgggacatccacacggagaccgccagctggatgttcggcgtcccccgggaggccgtggaccccctgatgcgccgggcggccaagaccatcaacttcggggtcctctacggcatgtcggcccaccgcctctcccaggagctagccatcccttacgaggaggcccaggccttcattgagcgctactttcagagcttccccaaggtgcgggcctggattgagaagaccctggaggagggcaggaggcgggggtacgtggagaccctcttcggccgccgccgctgtgtgccagacctagaggcccgggtgaagagcgtgcgggaggcggccgagcgcatggccttcaacatgcccgtccagggcaccgccgccgacctcatgaagctggctatggtgaagctcttccccaggctggaggaaatgggggccaggatgctccttcaggtccacgacgagctggtcctcgaggccccaaaagagagggcggaggccgtggcccggctggccaaggaggtcatggagggggtgtatcccctggccgtgcccctggaggtggaggtggggataggggaggactggctctccgccaaggagtgataccaccccatgctggcccaagccagcatgggggccccggcaaaaggtttctggggaagttaccaggcatggtgggccgaaggaaacaggaaacaagggtatgagggttttttgccctaaagaaaggccagggggtcctcccgaaggaaggcttccagggggataccccctgggcccaggagtagcccctttcctccaaaggcctgggtgaaggcttttagccctttggtcctttgggaaggggcgcttttgacctccaaagccagaaggcgccttcccttcttcaagacgaagtcaacctcctggtccctttcccgccagtagtacacctcaaagcccccgtgggggccgtgggccagaaggtgggcgcccacggcggtttccacgagccgccccatgagggcggcgtccgcccacacctcctttggggaaagccccaagaccgccgtgatgagccccgtattaagggccaggagcttggggctcgaggcgcggcgccggaagggctcggcggcgtacttctgcag

SEQ ID NO: 3206 - DNA, 3026 bp, Artificial Sequence
  Description of Artificial Sequence: Synthetic DNA sequence of Thermus aquaticus DNA Polymerase Y729G
atgagggggatgctgcccctctttgagcccaagggccgggtcctcctggtggacggccaccacctggcctaccgcaccttccacgccctgaagggcctcaccaccagccggggggagccggtgcaggcggtctacggcttcgccaagagcctcctcaaggccctcaaggaggacggggacgcggtgatcgtggtctttgacgccaaggccccctccttccgccacgaggcctacggggggtacaaggcgggccgggcccccacgccggaggactttccccggcaactcgccctcatcaaggagctggtggacctcctggggctggcgcgcctcgaggtcccgggctacgaggcggacgacgtcctggccagcctggccaagaaggcggaaaaggagggctacgaggtccgcatcctcaccgccgacaaagacctttaccagctcctttccgaccgcatccacgccctccaccccgaggggtacctcatcaccccggcctggctttgggaaaagtacggcctgaggcccgaccagtgggccgactaccgggccctgaccggggacgagtccgacaaccttcccggggtcaagggcatcggggagaagacggcgaggaagcttctggaggagtgggggagcctggaagccctcctcaagaacctggaccggctgaagcccgccatccgggagaagatcctggcccacatggacgatctgaagctctcctgggacctggccaaggtgcgcaccgacctgcccctggaggtggacttcgccaaaaggcgggagcccgaccgggagaggcttagggcctttctggagaggcttgagtttggcagcctcctccacgagttcggccttctggaaagccccaaggccctggaggaggccccctggcccccgccggaaggggccttcgtgggctttgtgctttcccgcaaggagcccatgtgggccgatcttctggccctggccgccgccagggggggccgggtccaccgggcccccgagccttataaagccctcagggacctgaaggaggcgcgggggcttctcgccaaagacctgagcgttctggccctgagggaaggccttggcctcccgcccggcgacgaccccatgctcctcgcctacctcctggacccttccaacaccacccccgagggggtggcccggcgctacggcggggagtggacggaggaggcgggggagcgggccgccctttccgagaggctcttcgccaacctgtgggggaggcttgagggggaggagaggctcctttggctttaccgggaggtggagaggcccctttccgctgtcctggcccacatggaggccacgggggtgcgcctggacgtggcctatctcagggccttgtccctggaggtggccgaggagatcgcccgcctcgaggccgaggtcttccgcctggccggccaccccttcaacctcaactcccgggaccagctggaaagggtcctctttgacgagctagggcttcccgccatcggcaagacggagaagaccggcaagcgctccaccagcgccgccgtcctggaggccctccgcgaggcccaccccatcgtggagaagatcctgcagtaccgggagctcaccaagctgaagagcacctacattgaccccttgccggacctcatccaccccaggacgggccgcctccacacccgcttcaaccagacggccacggccacgggcaggctaagtagctccgatcccaacctccagaacatccccgtccgcaccccgcttgggcagaggatccgccgggccttcatcgccgaggaggggtggctattggtggccctggactatagccagatagagctcagggtgctggcccacctctccggcgacgagaacctgatccgggtcttccaggaggggcgggacatccacacggagaccgccagctggatgttcggcgtcccccgggaggccgtggaccccctgatgcgccgggcggccaagaccatcaacttcggggtcctctacggcatgtcggcccaccgcctctcccaggagctagccatcccttacgaggaggcccaggccttcattgagcgctactttcagagcttccccaaggtgcgggcctggattgagaagaccctggaggagggcaggaggcgggggtacgtggagaccctcttcggccgccgccgcggtgtgccagacctagaggcccgggtgaagagcgtgcgggaggcggccgagcgcatggccttcaacatgcccgtccagggcaccgccgccgacctcatgaagctggctatggtgaagctcttccccaggctggaggaaatgggggccaggatgctccttcaggtccacgacgagctggtcctcgaggccccaaaagagagggcggaggccgtggcccggctggccaaggaggtcatggagggggtgtatcccctggccgtgcccctggaggtggaggtggggataggggaggactggctctccgccaaggagtgataccaccccatgctggcccaagccagcatgggggccccggcaaaaggtttctggggaagttaccaggcatggtgggccgaaggaaacaggaaacaagggtatgagggttttttgccctaaagaaaggccagggggtcctcccgaaggaaggcttccagggggataccccctgggcccaggagtagcccctttcctccaaaggcctgggtgaaggcttttagccctttggtcctttgggaaggggcgcttttgacctccaaagccagaaggcgccttcccttcttcaagacgaagtcaacctcctggtccctttcccgccagtagtacacctcaaagcccccgtgggggccgtgggccagaaggtgggcgcccacggcggtttccacgagccgccccatgagggcggcgtccgcccacacctcctttggggaaagccccaagaccgccgtgatgagccccgtattaagggccaggagcttggggctcgaggcgcggcgccggaagggctcggcggcgtacttctgcag

SEQ ID NO: 3207 - DNA, 3026 bp, Artificial Sequence
  Description of Artificial Sequence: Synthetic DNA sequence of Thermus aquaticus DNA Polymerase Y729Q
atgagggggatgctgcccctctttgagcccaagggccgggtcctcctggtggacggccaccacctggcctaccgcaccttccacgccctgaagggcctcaccaccagccggggggagccggtgcaggcggtctacggcttcgccaagagcctcctcaaggccctcaaggaggacggggacgcggtgatcgtggtctttgacgccaaggccccctccttccgccacgaggcctacggggggtacaaggcgggccgggcccccacgccggaggactttccccggcaactcgccctcatcaaggagctggtggacctcctggggctggcgcgcctcgaggtcccgggctacgaggcggacgacgtcctggccagcctggccaagaaggcggaaaaggagggctacgaggtccgcatcctcaccgccgacaaagacctttaccagctcctttccgaccgcatccacgccctccaccccgaggggtacctcatcaccccggcctggctttgggaaaagtacggcctgaggcccgaccagtgggccgactaccgggccctgaccggggacgagtccgacaaccttcccggggtcaagggcatcggggagaagacggcgaggaagcttctggaggagtgggggagcctggaagccctcctcaagaacctggaccggctgaagcccgccatccgggagaagatcctggcccacatggacgatctgaagctctcctgggacctggccaaggtgcgcaccgacctgcccctggaggtggacttcgccaaaaggcgggagcccgaccgggagaggcttagggcctttctggagaggcttgagtttggcagcctcctccacgagttcggccttctggaaagccccaaggccctggaggaggccccctggcccccgccggaaggggccttcgtgggctttgtgctttcccgcaaggagcccatgtgggccgatcttctggccctggccgccgccagggggggccgggtccaccgggcccccgagccttataaagccctcagggacctgaaggaggcgcgggggcttctcgccaaagacctgagcgttctggccctgagggaaggccttggcctcccgcccggcgacgaccccatgctcctcgcctacctcctggacccttccaacaccacccccgagggggtggcccggcgctacggcggggagtggacggaggaggcgggggagcgggccgccctttccgagaggctcttcgccaacctgtgggggaggcttgagggggaggagaggctcctttggctttaccgggaggtggagaggcccctttccgctgtcctggcccacatggaggccacgggggtgcgcctggacgtggcctatctcagggccttgtccctggaggtggccgaggagatcgcccgcctcgaggccgaggtcttccgcctggccggccaccccttcaacctcaactcccgggaccagctggaaagggtcctctttgacgagctagggcttcccgccatcggcaagacggagaagaccggcaagcgctccaccagcgccgccgtcctggaggccctccgcgaggcccaccccatcgtggagaagatcctgcagtaccgggagctcaccaagctgaagagcacctacattgaccccttgccggacctcatccaccccaggacgggccgcctccacacccgcttcaaccagacggccacggccacgggcaggctaagtagctccgatcccaacctccagaacatccccgtccgcaccccgcttgggcagaggatccgccgggccttcatcgccgaggaggggtggctattggtggccctggactatagccagatagagctcagggtgctggcccacctctccggcgacgagaacctgatccgggtcttccaggaggggcgggacatccacacggagaccgccagctggatgttcggcgtcccccgggaggccgtggaccccctgatgcgccgggcggccaagaccatcaacttcggggtcctctacggcatgtcggcccaccgcctctcccaggagctagccatcccttacgaggaggcccaggccttcattgagcgctactttcagagcttccccaaggtgcgggcctggattgagaagaccctggaggagggcaggaggcgggggtacgtggagaccctcttcggccgccgccgccaagtgccagacctagaggcccgggtgaagagcgtgcgggaggcggccgagcgcatggccttcaacatgcccgtccagggcaccgccgccgacctcatgaagctggctatggtgaagctcttccccaggctggaggaaatgggggccaggatgctccttcaggtccacgacgagctggtcctcgaggccccaaaagagagggcggaggccgtggcccggctggccaaggaggtcatggagggggtgtatcccctggccgtgcccctggaggtggaggtggggataggggaggactggctctccgccaaggagtgataccaccccatgctggcccaagccagcatgggggccccggcaaaaggtttctggggaagttaccaggcatggtgggccgaaggaaacaggaaacaagggtatgagggttttttgccctaaagaaaggccagggggtcctcccgaaggaaggcttccagggggataccccctgggcccaggagtagcccctttcctccaaaggcctgggtgaaggcttttagccctttggtcctttgggaaggggcgcttttgacctccaaagccagaaggcgccttcccttcttcaagacgaagtcaacctcctggtccctttcccgccagtagtacacctcaaagcccccgtgggggccgtgggccagaaggtgggcgcccacggcggtttccacgagccgccccatgagggcggcgtccgcccacacctcctttggggaaagccccaagaccgccgtgatgagccccgtattaagggccaggagcttggggctcgaggcgcggcgccggaagggctcggcggcgtacttctgcag

SEQ ID NO: 3208 - DNA, 3026 bp, Artificial Sequence
  Description of Artificial Sequence: Synthetic DNA sequence of Thermus aquaticus DNA Polymerase Y729H
atgagggggatgctgcccctctttgagcccaagggccgggtcctcctggtggacggccaccacctggcctaccgcaccttccacgccctgaagggcctcaccaccagccggggggagccggtgcaggcggtctacggcttcgccaagagcctcctcaaggccctcaaggaggacggggacgcggtgatcgtggtctttgacgccaaggccccctccttccgccacgaggcctacggggggtacaaggcgggccgggcccccacgccggaggactttccccggcaactcgccctcatcaaggagctggtggacctcctggggctggcgcgcctcgaggtcccgggctacgaggcggacgacgtcctggccagcctggccaagaaggcggaaaaggagggctacgaggtccgcatcctcaccgccgacaaagacctttaccagctcctttccgaccgcatccacgccctccaccccgaggggtacctcatcaccccggcctggctttgggaaaagtacggcctgaggcccgaccagtgggccgactaccgggccctgaccggggacgagtccgacaaccttcccggggtcaagggcatcggggagaagacggcgaggaagcttctggaggagtgggggagcctggaagccctcctcaagaacctggaccggctgaagcccgccatccgggagaagatcctggcccacatggacgatctgaagctctcctgggacctggccaaggtgcgcaccgacctgcccctggaggtggacttcgccaaaaggcgggagcccgaccgggagaggcttagggcctttctggagaggcttgagtttggcagcctcctccacgagttcggccttctggaaagccccaaggccctggaggaggccccctggcccccgccggaaggggccttcgtgggctttgtgctttcccgcaaggagcccatgtgggccgatcttctggccctggccgccgccagggggggccgggtccaccgggcccccgagccttataaagccctcagggacctgaaggaggcgcgggggcttctcgccaaagacctgagcgttctggccctgagggaaggccttggcctcccgcccggcgacgaccccatgctcctcgcctacctcctggacccttccaacaccacccccgagggggtggcccggcgctacggcggggagtggacggaggaggcgggggagcgggccgccctttccgagaggctcttcgccaacctgtgggggaggcttgagggggaggagaggctcctttggctttaccgggaggtggagaggcccctttccgctgtcctggcccacatggaggccacgggggtgcgcctggacgtggcctatctcagggccttgtccctggaggtggccgaggagatcgcccgcctcgaggccgaggtcttccgcctggccggccaccccttcaacctcaactcccgggaccagctggaaagggtcctctttgacgagctagggcttcccgccatcggcaagacggagaagaccggcaagcgctccaccagcgccgccgtcctggaggccctccgcgaggcccaccccatcgtggagaagatcctgcagtaccgggagctcaccaagctgaagagcacctacattgaccccttgccggacctcatccaccccaggacgggccgcctccacacccgcttcaaccagacggccacggccacgggcaggctaagtagctccgatcccaacctccagaacatccccgtccgcaccccgcttgggcagaggatccgccgggccttcatcgccgaggaggggtggctattggtggccctggactatagccagatagagctcagggtgctggcccacctctccggcgacgagaacctgatccgggtcttccaggaggggcgggacatccacacggagaccgccagctggatgttcggcgtcccccgggaggccgtggaccccctgatgcgccgggcggccaagaccatcaacttcggggtcctctacggcatgtcggcccaccgcctctcccaggagctagccatcccttacgaggaggcccaggccttcattgagcgctactttcagagcttccccaaggtgcgggcctggattgagaagaccctggaggagggcaggaggcgggggtacgtggagaccctcttcggccgccgccgccatgtgccagacctagaggcccgggtgaagagcgtgcgggaggcggccgagcgcatggccttcaacatgcccgtccagggcaccgccgccgacctcatgaagctggctatggtgaagctcttccccaggctggaggaaatgggggccaggatgctccttcaggtccacgacgagctggtcctcgaggccccaaaagagagggcggaggccgtggcccggctggccaaggaggtcatggagggggtgtatcccctggccgtgcccctggaggtggaggtggggataggggaggactggctctccgccaaggagtgataccaccccatgctggcccaagccagcatgggggccccggcaaaaggtttctggggaagttaccaggcatggtgggccgaaggaaacaggaaacaagggtatgagggttttttgccctaaagaaaggccagggggtcctcccgaaggaaggcttccagggggataccccctgggcccaggagtagcccctttcctccaaaggcctgggtgaaggcttttagccctttggtcctttgggaaggggcgcttttgacctccaaagccagaaggcgccttcccttcttcaagacgaagtcaacctcctggtccctttcccgccagtagtacacctcaaagcccccgtgggggccgtgggccagaaggtgggcgcccacggcggtttccacgagccgccccatgagggcggcgtccgcccacacctcctttggggaaagccccaagaccgccgtgatgagccccgtattaagggccaggagcttggggctcgaggcgcggcgccggaagggctcggcggcgtacttctgcag

SEQ ID NO: 3209 - DNA, 3026 bp, Artificial Sequence
  Description of Artificial Sequence: Synthetic DNA sequence of Thermus aquaticus DNA Polymerase Y729I
atgagggggatgctgcccctctttgagcccaagggccgggtcctcctggtggacggccaccacctggcctaccgcaccttccacgccctgaagggcctcaccaccagccggggggagccggtgcaggcggtctacggcttcgccaagagcctcctcaaggccctcaaggaggacggggacgcggtgatcgtggtctttgacgccaaggccccctccttccgccacgaggcctacggggggtacaaggcgggccgggcccccacgccggaggactttccccggcaactcgccctcatcaaggagctggtggacctcctggggctggcgcgcctcgaggtcccgggctacgaggcggacgacgtcctggccagcctggccaagaaggcggaaaaggagggctacgaggtccgcatcctcaccgccgacaaagacctttaccagctcctttccgaccgcatccacgccctccaccccgaggggtacctcatcaccccggcctggctttgggaaaagtacggcctgaggcccgaccagtgggccgactaccgggccctgaccggggacgagtccgacaaccttcccggggtcaagggcatcggggagaagacggcgaggaagcttctggaggagtgggggagcctggaagccctcctcaagaacctggaccggctgaagcccgccatccgggagaagatcctggcccacatggacgatctgaagctctcctgggacctggccaaggtgcgcaccgacctgcccctggaggtggacttcgccaaaaggcgggagcccgaccgggagaggcttagggcctttctggagaggcttgagtttggcagcctcctccacgagttcggccttctggaaagccccaaggccctggaggaggccccctggcccccgccggaaggggccttcgtgggctttgtgctttcccgcaaggagcccatgtgggccgatcttctggccctggccgccgccagggggggccgggtccaccgggcccccgagccttataaagccctcagggacctgaaggaggcgcgggggcttctcgccaaagacctgagcgttctggccctgagggaaggccttggcctcccgcccggcgacgaccccatgctcctcgcctacctcctggacccttccaacaccacccccgagggggtggcccggcgctacggcggggagtggacggaggaggcgggggagcgggccgccctttccgagaggctcttcgccaacctgtgggggaggcttgagggggaggagaggctcctttggctttaccgggaggtggagaggcccctttccgctgtcctggcccacatggaggccacgggggtgcgcctggacgtggcctatctcagggccttgtccctggaggtggccgaggagatcgcccgcctcgaggccgaggtcttccgcctggccggccaccccttcaacctcaactcccgggaccagctggaaagggtcctctttgacgagctagggcttcccgccatcggcaagacggagaagaccggcaagcgctccaccagcgccgccgtcctggaggccctccgcgaggcccaccccatcgtggagaagatcctgcagtaccgggagctcaccaagctgaagagcacctacattgaccccttgccggacctcatccaccccaggacgggccgcctccacacccgcttcaaccagacggccacggccacgggcaggctaagtagctccgatcccaacctccagaacatccccgtccgcaccccgcttgggcagaggatccgccgggccttcatcgccgaggaggggtggctattggtggccctggactatagccagatagagctcagggtgctggcccacctctccggcgacgagaacctgatccgggtcttccaggaggggcgggacatccacacggagaccgccagctggatgttcggcgtcccccgggaggccgtggaccccctgatgcgccgggcggccaagaccatcaacttcggggtcctctacggcatgtcggcccaccgcctctcccaggagctagccatcccttacgaggaggcccaggccttcattgagcgctactttcagagcttccccaaggtgcgggcctggattgagaagaccctggaggagggcaggaggcgggggtacgtggagaccctcttcggccgccgccgcattgtgccagacctagaggcccgggtgaagagcgtgcgggaggcggccgagcgcatggccttcaacatgcccgtccagggcaccgccgccgacctcatgaagctggctatggtgaagctcttccccaggctggaggaaatgggggccaggatgctccttcaggtccacgacgagctggtcctcgaggccccaaaagagagggcggaggccgtggcccggctggccaaggaggtcatggagggggtgtatcccctggccgtgcccctggaggtggaggtggggataggggaggactggctctccgccaaggagtgataccaccccatgctggcccaagccagcatgggggccccggcaaaaggtttctggggaagttaccaggcatggtgggccgaaggaaacaggaaacaagggtatgagggttttttgccctaaagaaaggccagggggtcctcccgaaggaaggcttccagggggataccccctgggcccaggagtagcccctttcctccaaaggcctgggtgaaggcttttagccctttggtcctttgggaaggggcgcttttgacctccaaagccagaaggcgccttcccttcttcaagacgaagtcaacctcctggtccctttcccgccagtagtacacctcaaagcccccgtgggggccgtgggccagaaggtgggcgcccacggcggtttccacgagccgccccatgagggcggcgtccgcccacacctcctttggggaaagccccaagaccgccgtgatgagccccgtattaagggccaggagcttggggctcgaggcgcggcgccggaagggctcggcggcgtacttctgcag

SEQ ID NO: 3210 - DNA, 3026 bp, Artificial Sequence
  Description of Artificial Sequence: Synthetic DNA sequence of Thermus aquaticus DNA Polymerase Y729L
atgagggggatgctgcccctctttgagcccaagggccgggtcctcctggtggacggccaccacctggcctaccgcaccttccacgccctgaagggcctcaccaccagccggggggagccggtgcaggcggtctacggcttcgccaagagcctcctcaaggccctcaaggaggacggggacgcggtgatcgtggtctttgacgccaaggccccctccttccgccacgaggcctacggggggtacaaggcgggccgggcccccacgccggaggactttccccggcaactcgccctcatcaaggagctggtggacctcctggggctggcgcgcctcgaggtcccgggctacgaggcggacgacgtcctggccagcctggccaagaaggcggaaaaggagggctacgaggtccgcatcctcaccgccgacaaagacctttaccagctcctttccgaccgcatccacgccctccaccccgaggggtacctcatcaccccggcctggctttgggaaaagtacggcctgaggcccgaccagtgggccgactaccgggccctgaccggggacgagtccgacaaccttcccggggtcaagggcatcggggagaagacggcgaggaagcttctggaggagtgggggagcctggaagccctcctcaagaacctggaccggctgaagcccgccatccgggagaagatcctggcccacatggacgatctgaagctctcctgggacctggccaaggtgcgcaccgacctgcccctggaggtggacttcgccaaaaggcgggagcccgaccgggagaggcttagggcctttctggagaggcttgagtttggcagcctcctccacgagttcggccttctggaaagccccaaggccctggaggaggccccctggcccccgccggaaggggccttcgtgggctttgtgctttcccgcaaggagcccatgtgggccgatcttctggccctggccgccgccagggggggccgggtccaccgggcccccgagccttataaagccctcagggacctgaaggaggcgcgggggcttctcgccaaagacctgagcgttctggccctgagggaaggccttggcctcccgcccggcgacgaccccatgctcctcgcctacctcctggacccttccaacaccacccccgagggggtggcccggcgctacggcggggagtggacggaggaggcgggggagcgggccgccctttccgagaggctcttcgccaacctgtgggggaggcttgagggggaggagaggctcctttggctttaccgggaggtggagaggcccctttccgctgtcctggcccacatggaggccacgggggtgcgcctggacgtggcctatctcagggccttgtccctggaggtggccgaggagatcgcccgcctcgaggccgaggtcttccgcctggccggccaccccttcaacctcaactcccgggaccagctggaaagggtcctctttgacgagctagggcttcccgccatcggcaagacggagaagaccggcaagcgctccaccagcgccgccgtcctggaggccctccgcgaggcccaccccatcgtggagaagatcctgcagtaccgggagctcaccaagctgaagagcacctacattgaccccttgccggacctcatccaccccaggacgggccgcctccacacccgcttcaaccagacggccacggccacgggcaggctaagtagctccgatcccaacctccagaacatccccgtccgcaccccgcttgggcagaggatccgccgggccttcatcgccgaggaggggtggctattggtggccctggactatagccagatagagctcagggtgctggcccacctctccggcgacgagaacctgatccgggtcttccaggaggggcgggacatccacacggagaccgccagctggatgttcggcgtcccccgggaggccgtggaccccctgatgcgccgggcggccaagaccatcaacttcggggtcctctacggcatgtcggcccaccgcctctcccaggagctagccatcccttacgaggaggcccaggccttcattgagcgctactttcagagcttccccaaggtgcgggcctggattgagaagaccctggaggagggcaggaggcgggggtacgtggagaccctcttcggccgccgccgcttagtgccagacctagaggcccgggtgaagagcgtgcgggaggcggccgagcgcatggccttcaacatgcccgtccagggcaccgccgccgacctcatgaagctggctatggtgaagctcttccccaggctggaggaaatgggggccaggatgctccttcaggtccacgacgagctggtcctcgaggccccaaaagagagggcggaggccgtggcccggctggccaaggaggtcatggagggggtgtatcccctggccgtgcccctggaggtggaggtggggataggggaggactggctctccgccaaggagtgataccaccccatgctggcccaagccagcatgggggccccggcaaaaggtttctggggaagttaccaggcatggtgggccgaaggaaacaggaaacaagggtatgagggttttttgccctaaagaaaggccagggggtcctcccgaaggaaggcttccagggggataccccctgggcccaggagtagcccctttcctccaaaggcctgggtgaaggcttttagccctttggtcctttgggaaggggcgcttttgacctccaaagccagaaggcgccttcccttcttcaagacgaagtcaacctcctggtccctttcccgccagtagtacacctcaaagcccccgtgggggccgtgggccagaaggtgggcgcccacggcggtttccacgagccgccccatgagggcggcgtccgcccacacctcctttggggaaagccccaagaccgccgtgatgagccccgtattaagggccaggagcttggggctcgaggcgcggcgccggaagggctcggcggcgtacttctgcag

SEQ ID NO: 3211 - DNA, 3026 bp, Artificial Sequence
  Description of Artificial Sequence: Synthetic DNA sequence of Thermus aquaticus DNA Polymerase Y729K
atgagggggatgctgcccctctttgagcccaagggccgggtcctcctggtggacggccaccacctggcctaccgcaccttccacgccctgaagggcctcaccaccagccggggggagccggtgcaggcggtctacggcttcgccaagagcctcctcaaggccctcaaggaggacggggacgcggtgatcgtggtctttgacgccaaggccccctccttccgccacgaggcctacggggggtacaaggcgggccgggcccccacgccggaggactttccccggcaactcgccctcatcaaggagctggtggacctcctggggctggcgcgcctcgaggtcccgggctacgaggcggacgacgtcctggccagcctggccaagaaggcggaaaaggagggctacgaggtccgcatcctcaccgccgacaaagacctttaccagctcctttccgaccgcatccacgccctccaccccgaggggtacctcatcaccccggcctggctttgggaaaagtacggcctgaggcccgaccagtgggccgactaccgggccctgaccggggacgagtccgacaaccttcccggggtcaagggcatcggggagaagacggcgaggaagcttctggaggagtgggggagcctggaagccctcctcaagaacctggaccggctgaagcccgccatccgggagaagatcctggcccacatggacgatctgaagctctcctgggacctggccaaggtgcgcaccgacctgcccctggaggtggacttcgccaaaaggcgggagcccgaccgggagaggcttagggcctttctggagaggcttgagtttggcagcctcctccacgagttcggccttctggaaagccccaaggccctggaggaggccccctggcccccgccggaaggggccttcgtgggctttgtgctttcccgcaaggagcccatgtgggccgatcttctggccctggccgccgccagggggggccgggtccaccgggcccccgagccttataaagccctcagggacctgaaggaggcgcgggggcttctcgccaaagacctgagcgttctggccctgagggaaggccttggcctcccgcccggcgacgaccccatgctcctcgcctacctcctggacccttccaacaccacccccgagggggtggcccggcgctacggcggggagtggacggaggaggcgggggagcgggccgccctttccgagaggctcttcgccaacctgtgggggaggcttgagggggaggagaggctcctttggctttaccgggaggtggagaggcccctttccgctgtcctggcccacatggaggccacgggggtgcgcctggacgtggcctatctcagggccttgtccctggaggtggccgaggagatcgcccgcctcgaggccgaggtcttccgcctggccggccaccccttcaacctcaactcccgggaccagctggaaagggtcctctttgacgagctagggcttcccgccatcggcaagacggagaagaccggcaagcgctccaccagcgccgccgtcctggaggccctccgcgaggcccaccccatcgtggagaagatcctgcagtaccgggagctcaccaagctgaagagcacctacattgaccccttgccggacctcatccaccccaggacgggccgcctccacacccgcttcaaccagacggccacggccacgggcaggctaagtagctccgatcccaacctccagaacatccccgtccgcaccccgcttgggcagaggatccgccgggccttcatcgccgaggaggggtggctattggtggccctggactatagccagatagagctcagggtgctggcccacctctccggcgacgagaacctgatccgggtcttccaggaggggcgggacatccacacggagaccgccagctggatgttcggcgtcccccgggaggccgtggaccccctgatgcgccgggcggccaagaccatcaacttcggggtcctctacggcatgtcggcccaccgcctctcccaggagctagccatcccttacgaggaggcccaggccttcattgagcgctactttcagagcttccccaaggtgcgggcctggattgagaagaccctggaggagggcaggaggcgggggtacgtggagaccctcttcggccgccgccgcaaagtgccagacctagaggcccgggtgaagagcgtgcgggaggcggccgagcgcatggccttcaacatgcccgtccagggcaccgccgccgacctcatgaagctggctatggtgaagctcttccccaggctggaggaaatgggggccaggatgctccttcaggtccacgacgagctggtcctcgaggccccaaaagagagggcggaggccgtggcccggctggccaaggaggtcatggagggggtgtatcccctggccgtgcccctggaggtggaggtggggataggggaggactggctctccgccaaggagtgataccaccccatgctggcccaagccagcatgggggccccggcaaaaggtttctggggaagttaccaggcatggtgggccgaaggaaacaggaaacaagggtatgagggttttttgccctaaagaaaggccagggggtcctcccgaaggaaggcttccagggggataccccctgggcccaggagtagcccctttcctccaaaggcctgggtgaaggcttttagccctttggtcctttgggaaggggcgcttttgacctccaaagccagaaggcgccttcccttcttcaagacgaagtcaacctcctggtccctttcccgccagtagtacacctcaaagcccccgtgggggccgtgggccagaaggtgggcgcccacggcggtttccacgagccgccccatgagggcggcgtccgcccacacctcctttggggaaagccccaagaccgccgtgatgagccccgtattaagggccaggagcttggggctcgaggcgcggcgccggaagggctcggcggcgtacttctgcag

SEQ ID NO: 3212 - DNA, 3026 bp, Artificial Sequence
  Description of Artificial Sequence: Synthetic DNA sequence of Thermus aquaticus DNA Polymerase Y729E
atgagggggatgctgcccctctttgagcccaagggccgggtcctcctggtggacggccaccacctggcctaccgcaccttccacgccctgaagggcctcaccaccagccggggggagccggtgcaggcggtctacggcttcgccaagagcctcctcaaggccctcaaggaggacggggacgcggtgatcgtggtctttgacgccaaggccccctccttccgccacgaggcctacggggggtacaaggcgggccgggcccccacgccggaggactttccccggcaactcgccctcatcaaggagctggtggacctcctggggctggcgcgcctcgaggtcccgggctacgaggcggacgacgtcctggccagcctggccaagaaggcggaaaaggagggctacgaggtccgcatcctcaccgccgacaaagacctttaccagctcctttccgaccgcatccacgccctccaccccgaggggtacctcatcaccccggcctggctttgggaaaagtacggcctgaggcccgaccagtgggccgactaccgggccctgaccggggacgagtccgacaaccttcccggggtcaagggcatcggggagaagacggcgaggaagcttctggaggagtgggggagcctggaagccctcctcaagaacctggaccggctgaagcccgccatccgggagaagatcctggcccacatggacgatctgaagctctcctgggacctggccaaggtgcgcaccgacctgcccctggaggtggacttcgccaaaaggcgggagcccgaccgggagaggcttagggcctttctggagaggcttgagtttggcagcctcctccacgagttcggccttctggaaagccccaaggccctggaggaggccccctggcccccgccggaaggggccttcgtgggctttgtgctttcccgcaaggagcccatgtgggccgatcttctggccctggccgccgccagggggggccgggtccaccgggcccccgagccttataaagccctcagggacctgaaggaggcgcgggggcttctcgccaaagacctgagcgttctggccctgagggaaggccttggcctcccgcccggcgacgaccccatgctcctcgcctacctcctggacccttccaacaccacccccgagggggtggcccggcgctacggcggggagtggacggaggaggcgggggagcgggccgccctttccgagaggctcttcgccaacctgtgggggaggcttgagggggaggagaggctcctttggctttaccgggaggtggagaggcccctttccgctgtcctggcccacatggaggccacgggggtgcgcctggacgtggcctatctcagggccttgtccctggaggtggccgaggagatcgcccgcctcgaggccgaggtcttccgcctggccggccaccccttcaacctcaactcccgggaccagctggaaagggtcctctttgacgagctagggcttcccgccatcggcaagacggagaagaccggcaagcgctccaccagcgccgccgtcctggaggccctccgcgaggcccaccccatcgtggagaagatcctgcagtaccgggagctcaccaagctgaagagcacctacattgaccccttgccggacctcatccaccccaggacgggccgcctccacacccgcttcaaccagacggccacggccacgggcaggctaagtagctccgatcccaacctccagaacatccccgtccgcaccccgcttgggcagaggatccgccgggccttcatcgccgaggaggggtggctattggtggccctggactatagccagatagagctcagggtgctggcccacctctccggcgacgagaacctgatccgggtcttccaggaggggcgggacatccacacggagaccgccagctggatgttcggcgtcccccgggaggccgtggaccccctgatgcgccgggcggccaagaccatcaacttcggggtcctctacggcatgtcggcccaccgcctctcccaggagctagccatcccttacgaggaggcccaggccttcattgagcgctactttcagagcttccccaaggtgcgggcctggattgagaagaccctggaggagggcaggaggcgggggtacgtggagaccctcttcggccgccgccgcgaagtgccagacctagaggcccgggtgaagagcgtgcgggaggcggccgagcgcatggccttcaacatgcccgtccagggcaccgccgccgacctcatgaagctggctatggtgaagctcttccccaggctggaggaaatgggggccaggatgctccttcaggtccacgacgagctggtcctcgaggccccaaaagagagggcggaggccgtggcccggctggccaaggaggtcatggagggggtgtatcccctggccgtgcccctggaggtggaggtggggataggggaggactggctctccgccaaggagtgataccaccccatgctggcccaagccagcatgggggccccggcaaaaggtttctggggaagttaccaggcatggtgggccgaaggaaacaggaaacaagggtatgagggttttttgccctaaagaaaggccagggggtcctcccgaaggaaggcttccagggggataccccctgggcccaggagtagcccctttcctccaaaggcctgggtgaaggcttttagccctttggtcctttgggaaggggcgcttttgacctccaaagccagaaggcgccttcccttcttcaagacgaagtcaacctcctggtccctttcccgccagtagtacacctcaaagcccccgtgggggccgtgggccagaaggtgggcgcccacggcggtttccacgagccgccccatgagggcggcgtccgcccacacctcctttggggaaagccccaagaccgccgtgatgagccccgtattaagggccaggagcttggggctcgaggcgcggcgccggaagggctcggcggcgtacttctgcag

SEQ ID NO: 3213 - DNA, 3026 bp, Artificial Sequence
  Description of Artificial Sequence: Synthetic DNA sequence of Thermus aquaticus DNA Polymerase Y729D
atgagggggatgctgcccctctttgagcccaagggccgggtcctcctggtggacggccaccacctggcctaccgcaccttccacgccctgaagggcctcaccaccagccggggggagccggtgcaggcggtctacggcttcgccaagagcctcctcaaggccctcaaggaggacggggacgcggtgatcgtggtctttgacgccaaggccccctccttccgccacgaggcctacggggggtacaaggcgggccgggcccccacgccggaggactttccccggcaactcgccctcatcaaggagctggtggacctcctggggctggcgcgcctcgaggtcccgggctacgaggcggacgacgtcctggccagcctggccaagaaggcggaaaaggagggctacgaggtccgcatcctcaccgccgacaaagacctttaccagctcctttccgaccgcatccacgccctccaccccgaggggtacctcatcaccccggcctggctttgggaaaagtacggcctgaggcccgaccagtgggccgactaccgggccctgaccggggacgagtccgacaaccttcccggggtcaagggcatcggggagaagacggcgaggaagcttctggaggagtgggggagcctggaagccctcctcaagaacctggaccggctgaagcccgccatccgggagaagatcctggcccacatggacgatctgaagctctcctgggacctggccaaggtgcgcaccgacctgcccctggaggtggacttcgccaaaaggcgggagcccgaccgggagaggcttagggcctttctggagaggcttgagtttggcagcctcctccacgagttcggccttctggaaagccccaaggccctggaggaggccccctggcccccgccggaaggggccttcgtgggctttgtgctttcccgcaaggagcccatgtgggccgatcttctggccctggccgccgccagggggggccgggtccaccgggcccccgagccttataaagccctcagggacctgaaggaggcgcgggggcttctcgccaaagacctgagcgttctggccctgagggaaggccttggcctcccgcccggcgacgaccccatgctcctcgcctacctcctggacccttccaacaccacccccgagggggtggcccggcgctacggcggggagtggacggaggaggcgggggagcgggccgccctttccgagaggctcttcgccaacctgtgggggaggcttgagggggaggagaggctcctttggctttaccgggaggtggagaggcccctttccgctgtcctggcccacatggaggccacgggggtgcgcctggacgtggcctatctcagggccttgtccctggaggtggccgaggagatcgcccgcctcgaggccgaggtcttccgcctggccggccaccccttcaacctcaactcccgggaccagctggaaagggtcctctttgacgagctagggcttcccgccatcggcaagacggagaagaccggcaagcgctccaccagcgccgccgtcctggaggccctccgcgaggcccaccccatcgtggagaagatcctgcagtaccgggagctcaccaagctgaagagcacctacattgaccccttgccggacctcatccaccccaggacgggccgcctccacacccgcttcaaccagacggccacggccacgggcaggctaagtagctccgatcccaacctccagaacatccccgtccgcaccccgcttgggcagaggatccgccgggccttcatcgccgaggaggggtggctattggtggccctggactatagccagatagagctcagggtgctggcccacctctccggcgacgagaacctgatccgggtcttccaggaggggcgggacatccacacggagaccgccagctggatgttcggcgtcccccgggaggccgtggaccccctgatgcgccgggcggccaagaccatcaacttcggggtcctctacggcatgtcggcccaccgcctctcccaggagctagccatcccttacgaggaggcccaggccttcattgagcgctactttcagagcttccccaaggtgcgggcctggattgagaagaccctggaggagggcaggaggcgggggtacgtggagaccctcttcggccgccgccgcgatgtgccagacctagaggcccgggtgaagagcgtgcgggaggcggccgagcgcatggccttcaacatgcccgtccagggcaccgccgccgacctcatgaagctggctatggtgaagctcttccccaggctggaggaaatgggggccaggatgctccttcaggtccacgacgagctggtcctcgaggccccaaaagagagggcggaggccgtggcccggctggccaaggaggtcatggagggggtgtatcccctggccgtgcccctggaggtggaggtggggataggggaggactggctctccgccaaggagtgataccaccccatgctggcccaagccagcatgggggccccggcaaaaggtttctggggaagttaccaggcatggtgggccgaaggaaacaggaaacaagggtatgagggttttttgccctaaagaaaggccagggggtcctcccgaaggaaggcttccagggggataccccctgggcccaggagtagcccctttcctccaaaggcctgggtgaaggcttttagccctttggtcctttgggaaggggcgcttttgacctccaaagccagaaggcgccttcccttcttcaagacgaagtcaacctcctggtccctttcccgccagtagtacacctcaaagcccccgtgggggccgtgggccagaaggtgggcgcccacggcggtttccacgagccgccccatgagggcggcgtccgcccacacctcctttggggaaagccccaagaccgccgtgatgagccccgtattaagggccaggagcttggggctcgaggcgcggcgccggaagggctcggcggcgtacttctgcag

SEQ ID NO: 3214 - DNA, 3026 bp, Artificial Sequence
  Description of Artificial Sequence: Synthetic DNA sequence of Thermus aquaticus DNA Polymerase Y729F
atgagggggatgctgcccctctttgagcccaagggccgggtcctcctggtggacggccaccacctggcctaccgcaccttccacgccctgaagggcctcaccaccagccggggggagccggtgcaggcggtctacggcttcgccaagagcctcctcaaggccctcaaggaggacggggacgcggtgatcgtggtctttgacgccaaggccccctccttccgccacgaggcctacggggggtacaaggcgggccgggcccccacgccggaggactttccccggcaactcgccctcatcaaggagctggtggacctcctggggctggcgcgcctcgaggtcccgggctacgaggcggacgacgtcctggccagcctggccaagaaggcggaaaaggagggctacgaggtccgcatcctcaccgccgacaaagacctttaccagctcctttccgaccgcatccacgccctccaccccgaggggtacctcatcaccccggcctggctttgggaaaagtacggcctgaggcccgaccagtgggccgactaccgggccctgaccggggacgagtccgacaaccttcccggggtcaagggcatcggggagaagacggcgaggaagcttctggaggagtgggggagcctggaagccctcctcaagaacctggaccggctgaagcccgccatccgggagaagatcctggcccacatggacgatctgaagctctcctgggacctggccaaggtgcgcaccgacctgcccctggaggtggacttcgccaaaaggcgggagcccgaccgggagaggcttagggcctttctggagaggcttgagtttggcagcctcctccacgagttcggccttctggaaagccccaaggccctggaggaggccccctggcccccgccggaaggggccttcgtgggctttgtgctttcccgcaaggagcccatgtgggccgatcttctggccctggccgccgccagggggggccgggtccaccgggcccccgagccttataaagccctcagggacctgaaggaggcgcgggggcttctcgccaaagacctgagcgttctggccctgagggaaggccttggcctcccgcccggcgacgaccccatgctcctcgcctacctcctggacccttccaacaccacccccgagggggtggcccggcgctacggcggggagtggacggaggaggcgggggagcgggccgccctttccgagaggctcttcgccaacctgtgggggaggcttgagggggaggagaggctcctttggctttaccgggaggtggagaggcccctttccgctgtcctggcccacatggaggccacgggggtgcgcctggacgtggcctatctcagggccttgtccctggaggtggccgaggagatcgcccgcctcgaggccgaggtcttccgcctggccggccaccccttcaacctcaactcccgggaccagctggaaagggtcctctttgacgagctagggcttcccgccatcggcaagacggagaagaccggcaagcgctccaccagcgccgccgtcctggaggccctccgcgaggcccaccccatcgtggagaagatcctgcagtaccgggagctcaccaagctgaagagcacctacattgaccccttgccggacctcatccaccccaggacgggccgcctccacacccgcttcaaccagacggccacggccacgggcaggctaagtagctccgatcccaacctccagaacatccccgtccgcaccccgcttgggcagaggatccgccgggccttcatcgccgaggaggggtggctattggtggccctggactatagccagatagagctcagggtgctggcccacctctccggcgacgagaacctgatccgggtcttccaggaggggcgggacatccacacggagaccgccagctggatgttcggcgtcccccgggaggccgtggaccccctgatgcgccgggcggccaagaccatcaacttcggggtcctctacggcatgtcggcccaccgcctctcccaggagctagccatcccttacgaggaggcccaggccttcattgagcgctactttcagagcttccccaaggtgcgggcctggattgagaagaccctggaggagggcaggaggcgggggtacgtggagaccctcttcggccgccgccgctttgtgccagacctagaggcccgggtgaagagcgtgcgggaggcggccgagcgcatggccttcaacatgcccgtccagggcaccgccgccgacctcatgaagctggctatggtgaagctcttccccaggctggaggaaatgggggccaggatgctccttcaggtccacgacgagctggtcctcgaggccccaaaagagagggcggaggccgtggcccggctggccaaggaggtcatggagggggtgtatcccctggccgtgcccctggaggtggaggtggggataggggaggactggctctccgccaaggagtgataccaccccatgctggcccaagccagcatgggggccccggcaaaaggtttctggggaagttaccaggcatggtgggccgaaggaaacaggaaacaagggtatgagggttttttgccctaaagaaaggccagggggtcctcccgaaggaaggcttccagggggataccccctgggcccaggagtagcccctttcctccaaaggcctgggtgaaggcttttagccctttggtcctttgggaaggggcgcttttgacctccaaagccagaaggcgccttcccttcttcaagacgaagtcaacctcctggtccctttcccgccagtagtacacctcaaagcccccgtgggggccgtgggccagaaggtgggcgcccacggcggtttccacgagccgccccatgagggcggcgtccgcccacacctcctttggggaaagccccaagaccgccgtgatgagccccgtattaagggccaggagcttggggctcgaggcgcggcgccggaagggctcggcggcgtacttctgcag

SEQ ID NO: 3215 - DNA, 3026 bp, Artificial Sequence
  Description of Artificial Sequence: Synthetic DNA sequence of Thermus aquaticus DNA Polymerase Y729S
atgagggggatgctgcccctctttgagcccaagggccgggtcctcctggtggacggccaccacctggcctaccgcaccttccacgccctgaagggcctcaccaccagccggggggagccggtgcaggcggtctacggcttcgccaagagcctcctcaaggccctcaaggaggacggggacgcggtgatcgtggtctttgacgccaaggccccctccttccgccacgaggcctacggggggtacaaggcgggccgggcccccacgccggaggactttccccggcaactcgccctcatcaaggagctggtggacctcctggggctggcgcgcctcgaggtcccgggctacgaggcggacgacgtcctggccagcctggccaagaaggcggaaaaggagggctacgaggtccgcatcctcaccgccgacaaagacctttaccagctcctttccgaccgcatccacgccctccaccccgaggggtacctcatcaccccggcctggctttgggaaaagtacggcctgaggcccgaccagtgggccgactaccgggccctgaccggggacgagtccgacaaccttcccggggtcaagggcatcggggagaagacggcgaggaagcttctggaggagtgggggagcctggaagccctcctcaagaacctggaccggctgaagcccgccatccgggagaagatcctggcccacatggacgatctgaagctctcctgggacctggccaaggtgcgcaccgacctgcccctggaggtggacttcgccaaaaggcgggagcccgaccgggagaggcttagggcctttctggagaggcttgagtttggcagcctcctccacgagttcggccttctggaaagccccaaggccctggaggaggccccctggcccccgccggaaggggccttcgtgggctttgtgctttcccgcaaggagcccatgtgggccgatcttctggccctggccgccgccagggggggccgggtccaccgggcccccgagccttataaagccctcagggacctgaaggaggcgcgggggcttctcgccaaagacctgagcgttctggccctgagggaaggccttggcctcccgcccggcgacgaccccatgctcctcgcctacctcctggacccttccaacaccacccccgagggggtggcccggcgctacggcggggagtggacggaggaggcgggggagcgggccgccctttccgagaggctcttcgccaacctgtgggggaggcttgagggggaggagaggctcctttggctttaccgggaggtggagaggcccctttccgctgtcctggcccacatggaggccacgggggtgcgcctggacgtggcctatctcagggccttgtccctggaggtggccgaggagatcgcccgcctcgaggccgaggtcttccgcctggccggccaccccttcaacctcaactcccgggaccagctggaaagggtcctctttgacgagctagggcttcccgccatcggcaagacggagaagaccggcaagcgctccaccagcgccgccgtcctggaggccctccgcgaggcccaccccatcgtggagaagatcctgcagtaccgggagctcaccaagctgaagagcacctacattgaccccttgccggacctcatccaccccaggacgggccgcctccacacccgcttcaaccagacggccacggccacgggcaggctaagtagctccgatcccaacctccagaacatccccgtccgcaccccgcttgggcagaggatccgccgggccttcatcgccgaggaggggtggctattggtggccctggactatagccagatagagctcagggtgctggcccacctctccggcgacgagaacctgatccgggtcttccaggaggggcgggacatccacacggagaccgccagctggatgttcggcgtcccccgggaggccgtggaccccctgatgcgccgggcggccaagaccatcaacttcggggtcctctacggcatgtcggcccaccgcctctcccaggagctagccatcccttacgaggaggcccaggccttcattgagcgctactttcagagcttccccaaggtgcgggcctggattgagaagaccctggaggagggcaggaggcgggggtacgtggagaccctcttcggccgccgccgctctgtgccagacctagaggcccgggtgaagagcgtgcgggaggcggccgagcgcatggccttcaacatgcccgtccagggcaccgccgccgacctcatgaagctggctatggtgaagctcttccccaggctggaggaaatgggggccaggatgctccttcaggtccacgacgagctggtcctcgaggccccaaaagagagggcggaggccgtggcccggctggccaaggaggtcatggagggggtgtatcccctggccgtgcccctggaggtggaggtggggataggggaggactggctctccgccaaggagtgataccaccccatgctggcccaagccagcatgggggccccggcaaaaggtttctggggaagttaccaggcatggtgggccgaaggaaacaggaaacaagggtatgagggttttttgccctaaagaaaggccagggggtcctcccgaaggaaggcttccagggggataccccctgggcccaggagtagcccctttcctccaaaggcctgggtgaaggcttttagccctttggtcctttgggaaggggcgcttttgacctccaaagccagaaggcgccttcccttcttcaagacgaagtcaacctcctggtccctttcccgccagtagtacacctcaaagcccccgtgggggccgtgggccagaaggtgggcgcccacggcggtttccacgagccgccccatgagggcggcgtccgcccacacctcctttggggaaagccccaagaccgccgtgatgagccccgtattaagggccaggagcttggggctcgaggcgcggcgccggaagggctcggcggcgtacttctgcag

SEQ ID NO: 3216 - DNA, 3026 bp, Artificial Sequence
  Description of Artificial Sequence: Synthetic DNA sequence of Thermus aquaticus DNA Polymerase Y729W
atgagggggatgctgcccctctttgagcccaagggccgggtcctcctggtggacggccaccacctggcctaccgcaccttccacgccctgaagggcctcaccaccagccggggggagccggtgcaggcggtctacggcttcgccaagagcctcctcaaggccctcaaggaggacggggacgcggtgatcgtggtctttgacgccaaggccccctccttccgccacgaggcctacggggggtacaaggcgggccgggcccccacgccggaggactttccccggcaactcgccctcatcaaggagctggtggacctcctggggctggcgcgcctcgaggtcccgggctacgaggcggacgacgtcctggccagcctggccaagaaggcggaaaaggagggctacgaggtccgcatcctcaccgccgacaaagacctttaccagctcctttccgaccgcatccacgccctccaccccgaggggtacctcatcaccccggcctggctttgggaaaagtacggcctgaggcccgaccagtgggccgactaccgggccctgaccggggacgagtccgacaaccttcccggggtcaagggcatcggggagaagacggcgaggaagcttctggaggagtgggggagcctggaagccctcctcaagaacctggaccggctgaagcccgccatccgggagaagatcctggcccacatggacgatctgaagctctcctgggacctggccaaggtgcgcaccgacctgcccctggaggtggacttcgccaaaaggcgggagcccgaccgggagaggcttagggcctttctggagaggcttgagtttggcagcctcctccacgagttcggccttctggaaagccccaaggccctggaggaggccccctggcccccgccggaaggggccttcgtgggctttgtgctttcccgcaaggagcccatgtgggccgatcttctggccctggccgccgccagggggggccgggtccaccgggcccccgagccttataaagccctcagggacctgaaggaggcgcgggggcttctcgccaaagacctgagcgttctggccctgagggaaggccttggcctcccgcccggcgacgaccccatgctcctcgcctacctcctggacccttccaacaccacccccgagggggtggcccggcgctacggcggggagtggacggaggaggcgggggagcgggccgccctttccgagaggctcttcgccaacctgtgggggaggcttgagggggaggagaggctcctttggctttaccgggaggtggagaggcccctttccgctgtcctggcccacatggaggccacgggggtgcgcctggacgtggcctatctcagggccttgtccctggaggtggccgaggagatcgcccgcctcgaggccgaggtcttccgcctggccggccaccccttcaacctcaactcccgggaccagctggaaagggtcctctttgacgagctagggcttcccgccatcggcaagacggagaagaccggcaagcgctccaccagcgccgccgtcctggaggccctccgcgaggcccaccccatcgtggagaagatcctgcagtaccgggagctcaccaagctgaagagcacctacattgaccccttgccggacctcatccaccccaggacgggccgcctccacacccgcttcaaccagacggccacggccacgggcaggctaagtagctccgatcccaacctccagaacatccccgtccgcaccccgcttgggcagaggatccgccgggccttcatcgccgaggaggggtggctattggtggccctggactatagccagatagagctcagggtgctggcccacctctccggcgacgagaacctgatccgggtcttccaggaggggcgggacatccacacggagaccgccagctggatgttcggcgtcccccgggaggccgtggaccccctgatgcgccgggcggccaagaccatcaacttcggggtcctctacggcatgtcggcccaccgcctctcccaggagctagccatcccttacgaggaggcccaggccttcattgagcgctactttcagagcttccccaaggtgcgggcctggattgagaagaccctggaggagggcaggaggcgggggtacgtggagaccctcttcggccgccgccgctgggtgccagacctagaggcccgggtgaagagcgtgcgggaggcggccgagcgcatggccttcaacatgcccgtccagggcaccgccgccgacctcatgaagctggctatggtgaagctcttccccaggctggaggaaatgggggccaggatgctccttcaggtccacgacgagctggtcctcgaggccccaaaagagagggcggaggccgtggcccggctggccaaggaggtcatggagggggtgtatcccctggccgtgcccctggaggtggaggtggggataggggaggactggctctccgccaaggagtgataccaccccatgctggcccaagccagcatgggggccccggcaaaaggtttctggggaagttaccaggcatggtgggccgaaggaaacaggaaacaagggtatgagggttttttgccctaaagaaaggccagggggtcctcccgaaggaaggcttccagggggataccccctgggcccaggagtagcccctttcctccaaaggcctgggtgaaggcttttagccctttggtcctttgggaaggggcgcttttgacctccaaagccagaaggcgccttcccttcttcaagacgaagtcaacctcctggtccctttcccgccagtagtacacctcaaagcccccgtgggggccgtgggccagaaggtgggcgcccacggcggtttccacgagccgccccatgagggcggcgtccgcccacacctcctttggggaaagccccaagaccgccgtgatgagccccgtattaagggccaggagcttggggctcgaggcgcggcgccggaagggctcggcggcgtacttctgcag

SEQ ID NO: 3217 - DNA, 3026 bp, Artificial Sequence
  Description of Artificial Sequence: Synthetic DNA sequence of Thermus aquaticus DNA Polymerase Y729P
atgagggggatgctgcccctctttgagcccaagggccgggtcctcctggtggacggccaccacctggcctaccgcaccttccacgccctgaagggcctcaccaccagccggggggagccggtgcaggcggtctacggcttcgccaagagcctcctcaaggccctcaaggaggacggggacgcggtgatcgtggtctttgacgccaaggccccctccttccgccacgaggcctacggggggtacaaggcgggccgggcccccacgccggaggactttccccggcaactcgccctcatcaaggagctggtggacctcctggggctggcgcgcctcgaggtcccgggctacgaggcggacgacgtcctggccagcctggccaagaaggcggaaaaggagggctacgaggtccgcatcctcaccgccgacaaagacctttaccagctcctttccgaccgcatccacgccctccaccccgaggggtacctcatcaccccggcctggctttgggaaaagtacggcctgaggcccgaccagtgggccgactaccgggccctgaccggggacgagtccgacaaccttcccggggtcaagggcatcggggagaagacggcgaggaagcttctggaggagtgggggagcctggaagccctcctcaagaacctggaccggctgaagcccgccatccgggagaagatcctggcccacatggacgatctgaagctctcctgggacctggccaaggtgcgcaccgacctgcccctggaggtggacttcgccaaaaggcgggagcccgaccgggagaggcttagggcctttctggagaggcttgagtttggcagcctcctccacgagttcggccttctggaaagccccaaggccctggaggaggccccctggcccccgccggaaggggccttcgtgggctttgtgctttcccgcaaggagcccatgtgggccgatcttctggccctggccgccgccagggggggccgggtccaccgggcccccgagccttataaagccctcagggacctgaaggaggcgcgggggcttctcgccaaagacctgagcgttctggccctgagggaaggccttggcctcccgcccggcgacgaccccatgctcctcgcctacctcctggacccttccaacaccacccccgagggggtggcccggcgctacggcggggagtggacggaggaggcgggggagcgggccgccctttccgagaggctcttcgccaacctgtgggggaggcttgagggggaggagaggctcctttggctttaccgggaggtggagaggcccctttccgctgtcctggcccacatggaggccacgggggtgcgcctggacgtggcctatctcagggccttgtccctggaggtggccgaggagatcgcccgcctcgaggccgaggtcttccgcctggccggccaccccttcaacctcaactcccgggaccagctggaaagggtcctctttgacgagctagggcttcccgccatcggcaagacggagaagaccggcaagcgctccaccagcgccgccgtcctggaggccctccgcgaggcccaccccatcgtggagaagatcctgcagtaccgggagctcaccaagctgaagagcacctacattgaccccttgccggacctcatccaccccaggacgggccgcctccacacccgcttcaaccagacggccacggccacgggcaggctaagtagctccgatcccaacctccagaacatccccgtccgcaccccgcttgggcagaggatccgccgggccttcatcgccgaggaggggtggctattggtggccctggactatagccagatagagctcagggtgctggcccacctctccggcgacgagaacctgatccgggtcttccaggaggggcgggacatccacacggagaccgccagctggatgttcggcgtcccccgggaggccgtggaccccctgatgcgccgggcggccaagaccatcaacttcggggtcctctacggcatgtcggcccaccgcctctcccaggagctagccatcccttacgaggaggcccaggccttcattgagcgctactttcagagcttccccaaggtgcgggcctggattgagaagaccctggaggagggcaggaggcgggggtacgtggagaccctcttcggccgccgccgccctgtgccagacctagaggcccgggtgaagagcgtgcgggaggcggccgagcgcatggccttcaacatgcccgtccagggcaccgccgccgacctcatgaagctggctatggtgaagctcttccccaggctggaggaaatgggggccaggatgctccttcaggtccacgacgagctggtcctcgaggccccaaaagagagggcggaggccgtggcccggctggccaaggaggtcatggagggggtgtatcccctggccgtgcccctggaggtggaggtggggataggggaggactggctctccgccaaggagtgataccaccccatgctggcccaagccagcatgggggccccggcaaaaggtttctggggaagttaccaggcatggtgggccgaaggaaacaggaaacaagggtatgagggttttttgccctaaagaaaggccagggggtcctcccgaaggaaggcttccagggggataccccctgggcccaggagtagcccctttcctccaaaggcctgggtgaaggcttttagccctttggtcctttgggaaggggcgcttttgacctccaaagccagaaggcgccttcccttcttcaagacgaagtcaacctcctggtccctttcccgccagtagtacacctcaaagcccccgtgggggccgtgggccagaaggtgggcgcccacggcggtttccacgagccgccccatgagggcggcgtccgcccacacctcctttggggaaagccccaagaccgccgtgatgagccccgtattaagggccaggagcttggggctcgaggcgcggcgccggaagggctcggcggcgtacttctgcag

SEQ ID NO: 3218 - DNA, 3026 bp, Artificial Sequence
  Description of Artificial Sequence: Synthetic DNA sequence of Thermus aquaticus DNA Polymerase Y729M
atgagggggatgctgcccctctttgagcccaagggccgggtcctcctggtggacggccaccacctggcctaccgcaccttccacgccctgaagggcctcaccaccagccggggggagccggtgcaggcggtctacggcttcgccaagagcctcctcaaggccctcaaggaggacggggacgcggtgatcgtggtctttgacgccaaggccccctccttccgccacgaggcctacggggggtacaaggcgggccgggcccccacgccggaggactttccccggcaactcgccctcatcaaggagctggtggacctcctggggctggcgcgcctcgaggtcccgggctacgaggcggacgacgtcctggccagcctggccaagaaggcggaaaaggagggctacgaggtccgcatcctcaccgccgacaaagacctttaccagctcctttccgaccgcatccacgccctccaccccgaggggtacctcatcaccccggcctggctttgggaaaagtacggcctgaggcccgaccagtgggccgactaccgggccctgaccggggacgagtccgacaaccttcccggggtcaagggcatcggggagaagacggcgaggaagcttctggaggagtgggggagcctggaagccctcctcaagaacctggaccggctgaagcccgccatccgggagaagatcctggcccacatggacgatctgaagctctcctgggacctggccaaggtgcgcaccgacctgcccctggaggtggacttcgccaaaaggcgggagcccgaccgggagaggcttagggcctttctggagaggcttgagtttggcagcctcctccacgagttcggccttctggaaagccccaaggccctggaggaggccccctggcccccgccggaaggggccttcgtgggctttgtgctttcccgcaaggagcccatgtgggccgatcttctggccctggccgccgccagggggggccgggtccaccgggcccccgagccttataaagccctcagggacctgaaggaggcgcgggggcttctcgccaaagacctgagcgttctggccctgagggaaggccttggcctcccgcccggcgacgaccccatgctcctcgcctacctcctggacccttccaacaccacccccgagggggtggcccggcgctacggcggggagtggacggaggaggcgggggagcgggccgccctttccgagaggctcttcgccaacctgtgggggaggcttgagggggaggagaggctcctttggctttaccgggaggtggagaggcccctttccgctgtcctggcccacatggaggccacgggggtgcgcctggacgtggcctatctcagggccttgtccctggaggtggccgaggagatcgcccgcctcgaggccgaggtcttccgcctggccggccaccccttcaacctcaactcccgggaccagctggaaagggtcctctttgacgagctagggcttcccgccatcggcaagacggagaagaccggcaagcgctccaccagcgccgccgtcctggaggccctccgcgaggcccaccccatcgtggagaagatcctgcagtaccgggagctcaccaagctgaagagcacctacattgaccccttgccggacctcatccaccccaggacgggccgcctccacacccgcttcaaccagacggccacggccacgggcaggctaagtagctccgatcccaacctccagaacatccccgtccgcaccccgcttgggcagaggatccgccgggccttcatcgccgaggaggggtggctattggtggccctggactatagccagatagagctcagggtgctggcccacctctccggcgacgagaacctgatccgggtcttccaggaggggcgggacatccacacggagaccgccagctggatgttcggcgtcccccgggaggccgtggaccccctgatgcgccgggcggccaagaccatcaacttcggggtcctctacggcatgtcggcccaccgcctctcccaggagctagccatcccttacgaggaggcccaggccttcattgagcgctactttcagagcttccccaaggtgcgggcctggattgagaagaccctggaggagggcaggaggcgggggtacgtggagaccctcttcggccgccgccgcatggtgccagacctagaggcccgggtgaagagcgtgcgggaggcggccgagcgcatggccttcaacatgcccgtccagggcaccgccgccgacctcatgaagctggctatggtgaagctcttccccaggctggaggaaatgggggccaggatgctccttcaggtccacgacgagctggtcctcgaggccccaaaagagagggcggaggccgtggcccggctggccaaggaggtcatggagggggtgtatcccctggccgtgcccctggaggtggaggtggggataggggaggactggctctccgccaaggagtgataccaccccatgctggcccaagccagcatgggggccccggcaaaaggtttctggggaagttaccaggcatggtgggccgaaggaaacaggaaacaagggtatgagggttttttgccctaaagaaaggccagggggtcctcccgaaggaaggcttccagggggataccccctgggcccaggagtagcccctttcctccaaaggcctgggtgaaggcttttagccctttggtcctttgggaaggggcgcttttgacctccaaagccagaaggcgccttcccttcttcaagacgaagtcaacctcctggtccctttcccgccagtagtacacctcaaagcccccgtgggggccgtgggccagaaggtgggcgcccacggcggtttccacgagccgccccatgagggcggcgtccgcccacacctcctttggggaaagccccaagaccgccgtgatgagccccgtattaagggccaggagcttggggctcgaggcgcggcgccggaagggctcggcggcgtacttctgcag

SEQ ID NO: 3219 - DNA, 3026 bp, Artificial Sequence
  Description of Artificial Sequence: Synthetic DNA sequence of Thermus aquaticus DNA Polymerase Y729T
atgagggggatgctgcccctctttgagcccaagggccgggtcctcctggtggacggccaccacctggcctaccgcaccttccacgccctgaagggcctcaccaccagccggggggagccggtgcaggcggtctacggcttcgccaagagcctcctcaaggccctcaaggaggacggggacgcggtgatcgtggtctttgacgccaaggccccctccttccgccacgaggcctacggggggtacaaggcgggccgggcccccacgccggaggactttccccggcaactcgccctcatcaaggagctggtggacctcctggggctggcgcgcctcgaggtcccgggctacgaggcggacgacgtcctggccagcctggccaagaaggcggaaaaggagggctacgaggtccgcatcctcaccgccgacaaagacctttaccagctcctttccgaccgcatccacgccctccaccccgaggggtacctcatcaccccggcctggctttgggaaaagtacggcctgaggcccgaccagtgggccgactaccgggccctgaccggggacgagtccgacaaccttcccggggtcaagggcatcggggagaagacggcgaggaagcttctggaggagtgggggagcctggaagccctcctcaagaacctggaccggctgaagcccgccatccgggagaagatcctggcccacatggacgatctgaagctctcctgggacctggccaaggtgcgcaccgacctgcccctggaggtggacttcgccaaaaggcgggagcccgaccgggagaggcttagggcctttctggagaggcttgagtttggcagcctcctccacgagttcggccttctggaaagccccaaggccctggaggaggccccctggcccccgccggaaggggccttcgtgggctttgtgctttcccgcaaggagcccatgtgggccgatcttctggccctggccgccgccagggggggccgggtccaccgggcccccgagccttataaagccctcagggacctgaaggaggcgcgggggcttctcgccaaagacctgagcgttctggccctgagggaaggccttggcctcccgcccggcgacgaccccatgctcctcgcctacctcctggacccttccaacaccacccccgagggggtggcccggcgctacggcggggagtggacggaggaggcgggggagcgggccgccctttccgagaggctcttcgccaacctgtgggggaggcttgagggggaggagaggctcctttggctttaccgggaggtggagaggcccctttccgctgtcctggcccacatggaggccacgggggtgcgcctggacgtggcctatctcagggccttgtccctggaggtggccgaggagatcgcccgcctcgaggccgaggtcttccgcctggccggccaccccttcaacctcaactcccgggaccagctggaaagggtcctctttgacgagctagggcttcccgccatcggcaagacggagaagaccggcaagcgctccaccagcgccgccgtcctggaggccctccgcgaggcccaccccatcgtggagaagatcctgcagtaccgggagctcaccaagctgaagagcacctacattgaccccttgccggacctcatccaccccaggacgggccgcctccacacccgcttcaaccagacggccacggccacgggcaggctaagtagctccgatcccaacctccagaacatccccgtccgcaccccgcttgggcagaggatccgccgggccttcatcgccgaggaggggtggctattggtggccctggactatagccagatagagctcagggtgctggcccacctctccggcgacgagaacctgatccgggtcttccaggaggggcgggacatccacacggagaccgccagctggatgttcggcgtcccccgggaggccgtggaccccctgatgcgccgggcggccaagaccatcaacttcggggtcctctacggcatgtcggcccaccgcctctcccaggagctagccatcccttacgaggaggcccaggccttcattgagcgctactttcagagcttccccaaggtgcgggcctggattgagaagaccctggaggagggcaggaggcgggggtacgtggagaccctcttcggccgccgccgcactgtgccagacctagaggcccgggtgaagagcgtgcgggaggcggccgagcgcatggccttcaacatgcccgtccagggcaccgccgccgacctcatgaagctggctatggtgaagctcttccccaggctggaggaaatgggggccaggatgctccttcaggtccacgacgagctggtcctcgaggccccaaaagagagggcggaggccgtggcccggctggccaaggaggtcatggagggggtgtatcccctggccgtgcccctggaggtggaggtggggataggggaggactggctctccgccaaggagtgataccaccccatgctggcccaagccagcatgggggccccggcaaaaggtttctggggaagttaccaggcatggtgggccgaaggaaacaggaaacaagggtatgagggttttttgccctaaagaaaggccagggggtcctcccgaaggaaggcttccagggggataccccctgggcccaggagtagcccctttcctccaaaggcctgggtgaaggcttttagccctttggtcctttgggaaggggcgcttttgacctccaaagccagaaggcgccttcccttcttcaagacgaagtcaacctcctggtccctttcccgccagtagtacacctcaaagcccccgtgggggccgtgggccagaaggtgggcgcccacggcggtttccacgagccgccccatgagggcggcgtccgcccacacctcctttggggaaagccccaagaccgccgtgatgagccccgtattaagggccaggagcttggggctcgaggcgcggcgccggaagggctcggcggcgtacttctgcag

SEQ ID NO: 3220 - DNA, 3026 bp, Artificial Sequence
  Description of Artificial Sequence: Synthetic DNA sequence of Thermus aquaticus DNA Polymerase Y729N
atgagggggatgctgcccctctttgagcccaagggccgggtcctcctggtggacggccaccacctggcctaccgcaccttccacgccctgaagggcctcaccaccagccggggggagccggtgcaggcggtctacggcttcgccaagagcctcctcaaggccctcaaggaggacggggacgcggtgatcgtggtctttgacgccaaggccccctccttccgccacgaggcctacggggggtacaaggcgggccgggcccccacgccggaggactttccccggcaactcgccctcatcaaggagctggtggacctcctggggctggcgcgcctcgaggtcccgggctacgaggcggacgacgtcctggccagcctggccaagaaggcggaaaaggagggctacgaggtccgcatcctcaccgccgacaaagacctttaccagctcctttccgaccgcatccacgccctccaccccgaggggtacctcatcaccccggcctggctttgggaaaagtacggcctgaggcccgaccagtgggccgactaccgggccctgaccggggacgagtccgacaaccttcccggggtcaagggcatcggggagaagacggcgaggaagcttctggaggagtgggggagcctggaagccctcctcaagaacctggaccggctgaagcccgccatccgggagaagatcctggcccacatggacgatctgaagctctcctgggacctggccaaggtgcgcaccgacctgcccctggaggtggacttcgccaaaaggcgggagcccgaccgggagaggcttagggcctttctggagaggcttgagtttggcagcctcctccacgagttcggccttctggaaagccccaaggccctggaggaggccccctggcccccgccggaaggggccttcgtgggctttgtgctttcccgcaaggagcccatgtgggccgatcttctggccctggccgccgccagggggggccgggtccaccgggcccccgagccttataaagccctcagggacctgaaggaggcgcgggggcttctcgccaaagacctgagcgttctggccctgagggaaggccttggcctcccgcccggcgacgaccccatgctcctcgcctacctcctggacccttccaacaccacccccgagggggtggcccggcgctacggcggggagtggacggaggaggcgggggagcgggccgccctttccgagaggctcttcgccaacctgtgggggaggcttgagggggaggagaggctcctttggctttaccgggaggtggagaggcccctttccgctgtcctggcccacatggaggccacgggggtgcgcctggacgtggcctatctcagggccttgtccctggaggtggccgaggagatcgcccgcctcgaggccgaggtcttccgcctggccggccaccccttcaacctcaactcccgggaccagctggaaagggtcctctttgacgagctagggcttcccgccatcggcaagacggagaagaccggcaagcgctccaccagcgccgccgtcctggaggccctccgcgaggcccaccccatcgtggagaagatcctgcagtaccgggagctcaccaagctgaagagcacctacattgaccccttgccggacctcatccaccccaggacgggccgcctccacacccgcttcaaccagacggccacggccacgggcaggctaagtagctccgatcccaacctccagaacatccccgtccgcaccccgcttgggcagaggatccgccgggccttcatcgccgaggaggggtggctattggtggccctggactatagccagatagagctcagggtgctggcccacctctccggcgacgagaacctgatccgggtcttccaggaggggcgggacatccacacggagaccgccagctggatgttcggcgtcccccgggaggccgtggaccccctgatgcgccgggcggccaagaccatcaacttcggggtcctctacggcatgtcggcccaccgcctctcccaggagctagccatcccttacgaggaggcccaggccttcattgagcgctactttcagagcttccccaaggtgcgggcctggattgagaagaccctggaggagggcaggaggcgggggtacgtggagaccctcttcggccgccgccgcaatgtgccagacctagaggcccgggtgaagagcgtgcgggaggcggccgagcgcatggccttcaacatgcccgtccagggcaccgccgccgacctcatgaagctggctatggtgaagctcttccccaggctggaggaaatgggggccaggatgctccttcaggtccacgacgagctggtcctcgaggccccaaaagagagggcggaggccgtggcccggctggccaaggaggtcatggagggggtgtatcccctggccgtgcccctggaggtggaggtggggataggggaggactggctctccgccaaggagtgataccaccccatgctggcccaagccagcatgggggccccggcaaaaggtttctggggaagttaccaggcatggtgggccgaaggaaacaggaaacaagggtatgagggttttttgccctaaagaaaggccagggggtcctcccgaaggaaggcttccagggggataccccctgggcccaggagtagcccctttcctccaaaggcctgggtgaaggcttttagccctttggtcctttgggaaggggcgcttttgacctccaaagccagaaggcgccttcccttcttcaagacgaagtcaacctcctggtccctttcccgccagtagtacacctcaaagcccccgtgggggccgtgggccagaaggtgggcgcccacggcggtttccacgagccgccccatgagggcggcgtccgcccacacctcctttggggaaagccccaagaccgccgtgatgagccccgtattaagggccaggagcttggggctcgaggcgcggcgccggaagggctcggcggcgtacttctgcag

SEQ ID NO: 3221 - DNA, 3026 bp, Artificial Sequence
  Description of Artificial Sequence: Synthetic DNA sequence of Thermus aquaticus DNA Polymerase Y729V
atgagggggatgctgcccctctttgagcccaagggccgggtcctcctggtggacggccaccacctggcctaccgcaccttccacgccctgaagggcctcaccaccagccggggggagccggtgcaggcggtctacggcttcgccaagagcctcctcaaggccctcaaggaggacggggacgcggtgatcgtggtctttgacgccaaggccccctccttccgccacgaggcctacggggggtacaaggcgggccgggcccccacgccggaggactttccccggcaactcgccctcatcaaggagctggtggacctcctggggctggcgcgcctcgaggtcccgggctacgaggcggacgacgtcctggccagcctggccaagaaggcggaaaaggagggctacgaggtccgcatcctcaccgccgacaaagacctttaccagctcctttccgaccgcatccacgccctccaccccgaggggtacctcatcaccccggcctggctttgggaaaagtacggcctgaggcccgaccagtgggccgactaccgggccctgaccggggacgagtccgacaaccttcccggggtcaagggcatcggggagaagacggcgaggaagcttctggaggagtgggggagcctggaagccctcctcaagaacctggaccggctgaagcccgccatccgggagaagatcctggcccacatggacgatctgaagctctcctgggacctggccaaggtgcgcaccgacctgcccctggaggtggacttcgccaaaaggcgggagcccgaccgggagaggcttagggcctttctggagaggcttgagtttggcagcctcctccacgagttcggccttctggaaagccccaaggccctggaggaggccccctggcccccgccggaaggggccttcgtgggctttgtgctttcccgcaaggagcccatgtgggccgatcttctggccctggccgccgccagggggggccgggtccaccgggcccccgagccttataaagccctcagggacctgaaggaggcgcgggggcttctcgccaaagacctgagcgttctggccctgagggaaggccttggcctcccgcccggcgacgaccccatgctcctcgcctacctcctggacccttccaacaccacccccgagggggtggcccggcgctacggcggggagtggacggaggaggcgggggagcgggccgccctttccgagaggctcttcgccaacctgtgggggaggcttgagggggaggagaggctcctttggctttaccgggaggtggagaggcccctttccgctgtcctggcccacatggaggccacgggggtgcgcctggacgtggcctatctcagggccttgtccctggaggtggccgaggagatcgcccgcctcgaggccgaggtcttccgcctggccggccaccccttcaacctcaactcccgggaccagctggaaagggtcctctttgacgagctagggcttcccgccatcggcaagacggagaagaccggcaagcgctccaccagcgccgccgtcctggaggccctccgcgaggcccaccccatcgtggagaagatcctgcagtaccgggagctcaccaagctgaagagcacctacattgaccccttgccggacctcatccaccccaggacgggccgcctccacacccgcttcaaccagacggccacggccacgggcaggctaagtagctccgatcccaacctccagaacatccccgtccgcaccccgcttgggcagaggatccgccgggccttcatcgccgaggaggggtggctattggtggccctggactatagccagatagagctcagggtgctggcccacctctccggcgacgagaacctgatccgggtcttccaggaggggcgggacatccacacggagaccgccagctggatgttcggcgtcccccgggaggccgtggaccccctgatgcgccgggcggccaagaccatcaacttcggggtcctctacggcatgtcggcccaccgcctctcccaggagctagccatcccttacgaggaggcccaggccttcattgagcgctactttcagagcttccccaaggtgcgggcctggattgagaagaccctggaggagggcaggaggcgggggtacgtggagaccctcttcggccgccgccgcgtcgtgccagacctagaggcccgggtgaagagcgtgcgggaggcggccgagcgcatggccttcaacatgcccgtccagggcaccgccgccgacctcatgaagctggctatggtgaagctcttccccaggctggaggaaatgggggccaggatgctccttcaggtccacgacgagctggtcctcgaggccccaaaagagagggcggaggccgtggcccggctggccaaggaggtcatggagggggtgtatcccctggccgtgcccctggaggtggaggtggggataggggaggactggctctccgccaaggagtgataccaccccatgctggcccaagccagcatgggggccccggcaaaaggtttctggggaagttaccaggcatggtgggccgaaggaaacaggaaacaagggtatgagggttttttgccctaaagaaaggccagggggtcctcccgaaggaaggcttccagggggataccccctgggcccaggagtagcccctttcctccaaaggcctgggtgaaggcttttagccctttggtcctttgggaaggggcgcttttgacctccaaagccagaaggcgccttcccttcttcaagacgaagtcaacctcctggtccctttcccgccagtagtacacctcaaagcccccgtgggggccgtgggccagaaggtgggcgcccacggcggtttccacgagccgccccatgagggcggcgtccgcccacacctcctttggggaaagccccaagaccgccgtgatgagccccgtattaagggccaggagcttggggctcgaggcgcggcgccggaagggctcggcggcgtacttctgcag

SEQ ID NO: 3222 - DNA, 3026 bp, Artificial Sequence
  Description of Artificial Sequence: Synthetic DNA sequence of Thermus aquaticus DNA Polymerase V730A
atgagggggatgctgcccctctttgagcccaagggccgggtcctcctggtggacggccaccacctggcctaccgcaccttccacgccctgaagggcctcaccaccagccggggggagccggtgcaggcggtctacggcttcgccaagagcctcctcaaggccctcaaggaggacggggacgcggtgatcgtggtctttgacgccaaggccccctccttccgccacgaggcctacggggggtacaaggcgggccgggcccccacgccggaggactttccccggcaactcgccctcatcaaggagctggtggacctcctggggctggcgcgcctcgaggtcccgggctacgaggcggacgacgtcctggccagcctggccaagaaggcggaaaaggagggctacgaggtccgcatcctcaccgccgacaaagacctttaccagctcctttccgaccgcatccacgccctccaccccgaggggtacctcatcaccccggcctggctttgggaaaagtacggcctgaggcccgaccagtgggccgactaccgggccctgaccggggacgagtccgacaaccttcccggggtcaagggcatcggggagaagacggcgaggaagcttctggaggagtgggggagcctggaagccctcctcaagaacctggaccggctgaagcccgccatccgggagaagatcctggcccacatggacgatctgaagctctcctgggacctggccaaggtgcgcaccgacctgcccctggaggtggacttcgccaaaaggcgggagcccgaccgggagaggcttagggcctttctggagaggcttgagtttggcagcctcctccacgagttcggccttctggaaagccccaaggccctggaggaggccccctggcccccgccggaaggggccttcgtgggctttgtgctttcccgcaaggagcccatgtgggccgatcttctggccctggccgccgccagggggggccgggtccaccgggcccccgagccttataaagccctcagggacctgaaggaggcgcgggggcttctcgccaaagacctgagcgttctggccctgagggaaggccttggcctcccgcccggcgacgaccccatgctcctcgcctacctcctggacccttccaacaccacccccgagggggtggcccggcgctacggcggggagtggacggaggaggcgggggagcgggccgccctttccgagaggctcttcgccaacctgtgggggaggcttgagggggaggagaggctcctttggctttaccgggaggtggagaggcccctttccgctgtcctggcccacatggaggccacgggggtgcgcctggacgtggcctatctcagggccttgtccctggaggtggccgaggagatcgcccgcctcgaggccgaggtcttccgcctggccggccaccccttcaacctcaactcccgggaccagctggaaagggtcctctttgacgagctagggcttcccgccatcggcaagacggagaagaccggcaagcgctccaccagcgccgccgtcctggaggccctccgcgaggcccaccccatcgtggagaagatcctgcagtaccgggagctcaccaagctgaagagcacctacattgaccccttgccggacctcatccaccccaggacgggccgcctccacacccgcttcaaccagacggccacggccacgggcaggctaagtagctccgatcccaacctccagaacatccccgtccgcaccccgcttgggcagaggatccgccgggccttcatcgccgaggaggggtggctattggtggccctggactatagccagatagagctcagggtgctggcccacctctccggcgacgagaacctgatccgggtcttccaggaggggcgggacatccacacggagaccgccagctggatgttcggcgtcccccgggaggccgtggaccccctgatgcgccgggcggccaagaccatcaacttcggggtcctctacggcatgtcggcccaccgcctctcccaggagctagccatcccttacgaggaggcccaggccttcattgagcgctactttcagagcttccccaaggtgcgggcctggattgagaagaccctggaggagggcaggaggcgggggtacgtggagaccctcttcggccgccgccgctacgctccagacctagaggcccgggtgaagagcgtgcgggaggcggccgagcgcatggccttcaacatgcccgtccagggcaccgccgccgacctcatgaagctggctatggtgaagctcttccccaggctggaggaaatgggggccaggatgctccttcaggtccacgacgagctggtcctcgaggccccaaaagagagggcggaggccgtggcccggctggccaaggaggtcatggagggggtgtatcccctggccgtgcccctggaggtggaggtggggataggggaggactggctctccgccaaggagtgataccaccccatgctggcccaagccagcatgggggccccggcaaaaggtttctggggaagttaccaggcatggtgggccgaaggaaacaggaaacaagggtatgagggttttttgccctaaagaaaggccagggggtcctcccgaaggaaggcttccagggggataccccctgggcccaggagtagcccctttcctccaaaggcctgggtgaaggcttttagccctttggtcctttgggaaggggcgcttttgacctccaaagccagaaggcgccttcccttcttcaagacgaagtcaacctcctggtccctttcccgccagtagtacacctcaaagcccccgtgggggccgtgggccagaaggtgggcgcccacggcggtttccacgagccgccccatgagggcggcgtccgcccacacctcctttggggaaagccccaagaccgccgtgatgagccccgtattaagggccaggagcttggggctcgaggcgcggcgccggaagggctcggcggcgtacttctgcag

SEQ ID NO: 3223 - DNA, 3026 bp, Artificial Sequence
  Description of Artificial Sequence: Synthetic DNA sequence of Thermus aquaticus DNA Polymerase V730R
atgagggggatgctgcccctctttgagcccaagggccgggtcctcctggtggacggccaccacctggcctaccgcaccttccacgccctgaagggcctcaccaccagccggggggagccggtgcaggcggtctacggcttcgccaagagcctcctcaaggccctcaaggaggacggggacgcggtgatcgtggtctttgacgccaaggccccctccttccgccacgaggcctacggggggtacaaggcgggccgggcccccacgccggaggactttccccggcaactcgccctcatcaaggagctggtggacctcctggggctggcgcgcctcgaggtcccgggctacgaggcggacgacgtcctggccagcctggccaagaaggcggaaaaggagggctacgaggtccgcatcctcaccgccgacaaagacctttaccagctcctttccgaccgcatccacgccctccaccccgaggggtacctcatcaccccggcctggctttgggaaaagtacggcctgaggcccgaccagtgggccgactaccgggccctgaccggggacgagtccgacaaccttcccggggtcaagggcatcggggagaagacggcgaggaagcttctggaggagtgggggagcctggaagccctcctcaagaacctggaccggctgaagcccgccatccgggagaagatcctggcccacatggacgatctgaagctctcctgggacctggccaaggtgcgcaccgacctgcccctggaggtggacttcgccaaaaggcgggagcccgaccgggagaggcttagggcctttctggagaggcttgagtttggcagcctcctccacgagttcggccttctggaaagccccaaggccctggaggaggccccctggcccccgccggaaggggccttcgtgggctttgtgctttcccgcaaggagcccatgtgggccgatcttctggccctggccgccgccagggggggccgggtccaccgggcccccgagccttataaagccctcagggacctgaaggaggcgcgggggcttctcgccaaagacctgagcgttctggccctgagggaaggccttggcctcccgcccggcgacgaccccatgctcctcgcctacctcctggacccttccaacaccacccccgagggggtggcccggcgctacggcggggagtggacggaggaggcgggggagcgggccgccctttccgagaggctcttcgccaacctgtgggggaggcttgagggggaggagaggctcctttggctttaccgggaggtggagaggcccctttccgctgtcctggcccacatggaggccacgggggtgcgcctggacgtggcctatctcagggccttgtccctggaggtggccgaggagatcgcccgcctcgaggccgaggtcttccgcctggccggccaccccttcaacctcaactcccgggaccagctggaaagggtcctctttgacgagctagggcttcccgccatcggcaagacggagaagaccggcaagcgctccaccagcgccgccgtcctggaggccctccgcgaggcccaccccatcgtggagaagatcctgcagtaccgggagctcaccaagctgaagagcacctacattgaccccttgccggacctcatccaccccaggacgggccgcctccacacccgcttcaaccagacggccacggccacgggcaggctaagtagctccgatcccaacctccagaacatccccgtccgcaccccgcttgggcagaggatccgccgggccttcatcgccgaggaggggtggctattggtggccctggactatagccagatagagctcagggtgctggcccacctctccggcgacgagaacctgatccgggtcttccaggaggggcgggacatccacacggagaccgccagctggatgttcggcgtcccccgggaggccgtggaccccctgatgcgccgggcggccaagaccatcaacttcggggtcctctacggcatgtcggcccaccgcctctcccaggagctagccatcccttacgaggaggcccaggccttcattgagcgctactttcagagcttccccaaggtgcgggcctggattgagaagaccctggaggagggcaggaggcgggggtacgtggagaccctcttcggccgccgccgctaccgaccagacctagaggcccgggtgaagagcgtgcgggaggcggccgagcgcatggccttcaacatgcccgtccagggcaccgccgccgacctcatgaagctggctatggtgaagctcttccccaggctggaggaaatgggggccaggatgctccttcaggtccacgacgagctggtcctcgaggccccaaaagagagggcggaggccgtggcccggctggccaaggaggtcatggagggggtgtatcccctggccgtgcccctggaggtggaggtggggataggggaggactggctctccgccaaggagtgataccaccccatgctggcccaagccagcatgggggccccggcaaaaggtttctggggaagttaccaggcatggtgggccgaaggaaacaggaaacaagggtatgagggttttttgccctaaagaaaggccagggggtcctcccgaaggaaggcttccagggggataccccctgggcccaggagtagcccctttcctccaaaggcctgggtgaaggcttttagccctttggtcctttgggaaggggcgcttttgacctccaaagccagaaggcgccttcccttcttcaagacgaagtcaacctcctggtccctttcccgccagtagtacacctcaaagcccccgtgggggccgtgggccagaaggtgggcgcccacggcggtttccacgagccgccccatgagggcggcgtccgcccacacctcctttggggaaagccccaagaccgccgtgatgagccccgtattaagggccaggagcttggggctcgaggcgcggcgccggaagggctcggcggcgtacttctgcag

SEQ ID NO: 3224 - DNA, 3026 bp, Artificial Sequence
  Description of Artificial Sequence: Synthetic DNA sequence of Thermus aquaticus DNA Polymerase V730C
atgagggggatgctgcccctctttgagcccaagggccgggtcctcctggtggacggccaccacctggcctaccgcaccttccacgccctgaagggcctcaccaccagccggggggagccggtgcaggcggtctacggcttcgccaagagcctcctcaaggccctcaaggaggacggggacgcggtgatcgtggtctttgacgccaaggccccctccttccgccacgaggcctacggggggtacaaggcgggccgggcccccacgccggaggactttccccggcaactcgccctcatcaaggagctggtggacctcctggggctggcgcgcctcgaggtcccgggctacgaggcggacgacgtcctggccagcctggccaagaaggcggaaaaggagggctacgaggtccgcatcctcaccgccgacaaagacctttaccagctcctttccgaccgcatccacgccctccaccccgaggggtacctcatcaccccggcctggctttgggaaaagtacggcctgaggcccgaccagtgggccgactaccgggccctgaccggggacgagtccgacaaccttcccggggtcaagggcatcggggagaagacggcgaggaagcttctggaggagtgggggagcctggaagccctcctcaagaacctggaccggctgaagcccgccatccgggagaagatcctggcccacatggacgatctgaagctctcctgggacctggccaaggtgcgcaccgacctgcccctggaggtggacttcgccaaaaggcgggagcccgaccgggagaggcttagggcctttctggagaggcttgagtttggcagcctcctccacgagttcggccttctggaaagccccaaggccctggaggaggccccctggcccccgccggaaggggccttcgtgggctttgtgctttcccgcaaggagcccatgtgggccgatcttctggccctggccgccgccagggggggccgggtccaccgggcccccgagccttataaagccctcagggacctgaaggaggcgcgggggcttctcgccaaagacctgagcgttctggccctgagggaaggccttggcctcccgcccggcgacgaccccatgctcctcgcctacctcctggacccttccaacaccacccccgagggggtggcccggcgctacggcggggagtggacggaggaggcgggggagcgggccgccctttccgagaggctcttcgccaacctgtgggggaggcttgagggggaggagaggctcctttggctttaccgggaggtggagaggcccctttccgctgtcctggcccacatggaggccacgggggtgcgcctggacgtggcctatctcagggccttgtccctggaggtggccgaggagatcgcccgcctcgaggccgaggtcttccgcctggccggccaccccttcaacctcaactcccgggaccagctggaaagggtcctctttgacgagctagggcttcccgccatcggcaagacggagaagaccggcaagcgctccaccagcgccgccgtcctggaggccctccgcgaggcccaccccatcgtggagaagatcctgcagtaccgggagctcaccaagctgaagagcacctacattgaccccttgccggacctcatccaccccaggacgggccgcctccacacccgcttcaaccagacggccacggccacgggcaggctaagtagctccgatcccaacctccagaacatccccgtccgcaccccgcttgggcagaggatccgccgggccttcatcgccgaggaggggtggctattggtggccctggactatagccagatagagctcagggtgctggcccacctctccggcgacgagaacctgatccgggtcttccaggaggggcgggacatccacacggagaccgccagctggatgttcggcgtcccccgggaggccgtggaccccctgatgcgccgggcggccaagaccatcaacttcggggtcctctacggcatgtcggcccaccgcctctcccaggagctagccatcccttacgaggaggcccaggccttcattgagcgctactttcagagcttccccaaggtgcgggcctggattgagaagaccctggaggagggcaggaggcgggggtacgtggagaccctcttcggccgccgccgctactgtccagacctagaggcccgggtgaagagcgtgcgggaggcggccgagcgcatggccttcaacatgcccgtccagggcaccgccgccgacctcatgaagctggctatggtgaagctcttccccaggctggaggaaatgggggccaggatgctccttcaggtccacgacgagctggtcctcgaggccccaaaagagagggcggaggccgtggcccggctggccaaggaggtcatggagggggtgtatcccctggccgtgcccctggaggtggaggtggggataggggaggactggctctccgccaaggagtgataccaccccatgctggcccaagccagcatgggggccccggcaaaaggtttctggggaagttaccaggcatggtgggccgaaggaaacaggaaacaagggtatgagggttttttgccctaaagaaaggccagggggtcctcccgaaggaaggcttccagggggataccccctgggcccaggagtagcccctttcctccaaaggcctgggtgaaggcttttagccctttggtcctttgggaaggggcgcttttgacctccaaagccagaaggcgccttcccttcttcaagacgaagtcaacctcctggtccctttcccgccagtagtacacctcaaagcccccgtgggggccgtgggccagaaggtgggcgcccacggcggtttccacgagccgccccatgagggcggcgtccgcccacacctcctttggggaaagccccaagaccgccgtgatgagccccgtattaagggccaggagcttggggctcgaggcgcggcgccggaagggctcggcggcgtacttctgcag

SEQ ID NO: 3225 - DNA, 3026 bp, Artificial Sequence
  Description of Artificial Sequence: Synthetic DNA sequence of Thermus aquaticus DNA Polymerase V730G
atgagggggatgctgcccctctttgagcccaagggccgggtcctcctggtggacggccaccacctggcctaccgcaccttccacgccctgaagggcctcaccaccagccggggggagccggtgcaggcggtctacggcttcgccaagagcctcctcaaggccctcaaggaggacggggacgcggtgatcgtggtctttgacgccaaggccccctccttccgccacgaggcctacggggggtacaaggcgggccgggcccccacgccggaggactttccccggcaactcgccctcatcaaggagctggtggacctcctggggctggcgcgcctcgaggtcccgggctacgaggcggacgacgtcctggccagcctggccaagaaggcggaaaaggagggctacgaggtccgcatcctcaccgccgacaaagacctttaccagctcctttccgaccgcatccacgccctccaccccgaggggtacctcatcaccccggcctggctttgggaaaagtacggcctgaggcccgaccagtgggccgactaccgggccctgaccggggacgagtccgacaaccttcccggggtcaagggcatcggggagaagacggcgaggaagcttctggaggagtgggggagcctggaagccctcctcaagaacctggaccggctgaagcccgccatccgggagaagatcctggcccacatggacgatctgaagctctcctgggacctggccaaggtgcgcaccgacctgcccctggaggtggacttcgccaaaaggcgggagcccgaccgggagaggcttagggcctttctggagaggcttgagtttggcagcctcctccacgagttcggccttctggaaagccccaaggccctggaggaggccccctggcccccgccggaaggggccttcgtgggctttgtgctttcccgcaaggagcccatgtgggccgatcttctggccctggccgccgccagggggggccgggtccaccgggcccccgagccttataaagccctcagggacctgaaggaggcgcgggggcttctcgccaaagacctgagcgttctggccctgagggaaggccttggcctcccgcccggcgacgaccccatgctcctcgcctacctcctggacccttccaacaccacccccgagggggtggcccggcgctacggcggggagtggacggaggaggcgggggagcgggccgccctttccgagaggctcttcgccaacctgtgggggaggcttgagggggaggagaggctcctttggctttaccgggaggtggagaggcccctttccgctgtcctggcccacatggaggccacgggggtgcgcctggacgtggcctatctcagggccttgtccctggaggtggccgaggagatcgcccgcctcgaggccgaggtcttccgcctggccggccaccccttcaacctcaactcccgggaccagctggaaagggtcctctttgacgagctagggcttcccgccatcggcaagacggagaagaccggcaagcgctccaccagcgccgccgtcctggaggccctccgcgaggcccaccccatcgtggagaagatcctgcagtaccgggagctcaccaagctgaagagcacctacattgaccccttgccggacctcatccaccccaggacgggccgcctccacacccgcttcaaccagacggccacggccacgggcaggctaagtagctccgatcccaacctccagaacatccccgtccgcaccccgcttgggcagaggatccgccgggccttcatcgccgaggaggggtggctattggtggccctggactatagccagatagagctcagggtgctggcccacctctccggcgacgagaacctgatccgggtcttccaggaggggcgggacatccacacggagaccgccagctggatgttcggcgtcccccgggaggccgtggaccccctgatgcgccgggcggccaagaccatcaacttcggggtcctctacggcatgtcggcccaccgcctctcccaggagctagccatcccttacgaggaggcccaggccttcattgagcgctactttcagagcttccccaaggtgcgggcctggattgagaagaccctggaggagggcaggaggcgggggtacgtggagaccctcttcggccgccgccgctacggtccagacctagaggcccgggtgaagagcgtgcgggaggcggccgagcgcatggccttcaacatgcccgtccagggcaccgccgccgacctcatgaagctggctatggtgaagctcttccccaggctggaggaaatgggggccaggatgctccttcaggtccacgacgagctggtcctcgaggccccaaaagagagggcggaggccgtggcccggctggccaaggaggtcatggagggggtgtatcccctggccgtgcccctggaggtggaggtggggataggggaggactggctctccgccaaggagtgataccaccccatgctggcccaagccagcatgggggccccggcaaaaggtttctggggaagttaccaggcatggtgggccgaaggaaacaggaaacaagggtatgagggttttttgccctaaagaaaggccagggggtcctcccgaaggaaggcttccagggggataccccctgggcccaggagtagcccctttcctccaaaggcctgggtgaaggcttttagccctttggtcctttgggaaggggcgcttttgacctccaaagccagaaggcgccttcccttcttcaagacgaagtcaacctcctggtccctttcccgccagtagtacacctcaaagcccccgtgggggccgtgggccagaaggtgggcgcccacggcggtttccacgagccgccccatgagggcggcgtccgcccacacctcctttggggaaagccccaagaccgccgtgatgagccccgtattaagggccaggagcttggggctcgaggcgcggcgccggaagggctcggcggcgtacttctgcag

SEQ ID NO: 3226 - DNA, 3026 bp, Artificial Sequence
  Description of Artificial Sequence: Synthetic DNA sequence of Thermus aquaticus DNA Polymerase V730Q
atgagggggatgctgcccctctttgagcccaagggccgggtcctcctggtggacggccaccacctggcctaccgcaccttccacgccctgaagggcctcaccaccagccggggggagccggtgcaggcggtctacggcttcgccaagagcctcctcaaggccctcaaggaggacggggacgcggtgatcgtggtctttgacgccaaggccccctccttccgccacgaggcctacggggggtacaaggcgggccgggcccccacgccggaggactttccccggcaactcgccctcatcaaggagctggtggacctcctggggctggcgcgcctcgaggtcccgggctacgaggcggacgacgtcctggccagcctggccaagaaggcggaaaaggagggctacgaggtccgcatcctcaccgccgacaaagacctttaccagctcctttccgaccgcatccacgccctccaccccgaggggtacctcatcaccccggcctggctttgggaaaagtacggcctgaggcccgaccagtgggccgactaccgggccctgaccggggacgagtccgacaaccttcccggggtcaagggcatcggggagaagacggcgaggaagcttctggaggagtgggggagcctggaagccctcctcaagaacctggaccggctgaagcccgccatccgggagaagatcctggcccacatggacgatctgaagctctcctgggacctggccaaggtgcgcaccgacctgcccctggaggtggacttcgccaaaaggcgggagcccgaccgggagaggcttagggcctttctggagaggcttgagtttggcagcctcctccacgagttcggccttctggaaagccccaaggccctggaggaggccccctggcccccgccggaaggggccttcgtgggctttgtgctttcccgcaaggagcccatgtgggccgatcttctggccctggccgccgccagggggggccgggtccaccgggcccccgagccttataaagccctcagggacctgaaggaggcgcgggggcttctcgccaaagacctgagcgttctggccctgagggaaggccttggcctcccgcccggcgacgaccccatgctcctcgcctacctcctggacccttccaacaccacccccgagggggtggcccggcgctacggcggggagtggacggaggaggcgggggagcgggccgccctttccgagaggctcttcgccaacctgtgggggaggcttgagggggaggagaggctcctttggctttaccgggaggtggagaggcccctttccgctgtcctggcccacatggaggccacgggggtgcgcctggacgtggcctatctcagggccttgtccctggaggtggccgaggagatcgcccgcctcgaggccgaggtcttccgcctggccggccaccccttcaacctcaactcccgggaccagctggaaagggtcctctttgacgagctagggcttcccgccatcggcaagacggagaagaccggcaagcgctccaccagcgccgccgtcctggaggccctccgcgaggcccaccccatcgtggagaagatcctgcagtaccgggagctcaccaagctgaagagcacctacattgaccccttgccggacctcatccaccccaggacgggccgcctccacacccgcttcaaccagacggccacggccacgggcaggctaagtagctccgatcccaacctccagaacatccccgtccgcaccccgcttgggcagaggatccgccgggccttcatcgccgaggaggggtggctattggtggccctggactatagccagatagagctcagggtgctggcccacctctccggcgacgagaacctgatccgggtcttccaggaggggcgggacatccacacggagaccgccagctggatgttcggcgtcccccgggaggccgtggaccccctgatgcgccgggcggccaagaccatcaacttcggggtcctctacggcatgtcggcccaccgcctctcccaggagctagccatcccttacgaggaggcccaggccttcattgagcgctactttcagagcttccccaaggtgcgggcctggattgagaagaccctggaggagggcaggaggcgggggtacgtggagaccctcttcggccgccgccgctaccaaccagacctagaggcccgggtgaagagcgtgcgggaggcggccgagcgcatggccttcaacatgcccgtccagggcaccgccgccgacctcatgaagctggctatggtgaagctcttccccaggctggaggaaatgggggccaggatgctccttcaggtccacgacgagctggtcctcgaggccccaaaagagagggcggaggccgtggcccggctggccaaggaggtcatggagggggtgtatcccctggccgtgcccctggaggtggaggtggggataggggaggactggctctccgccaaggagtgataccaccccatgctggcccaagccagcatgggggccccggcaaaaggtttctggggaagttaccaggcatggtgggccgaaggaaacaggaaacaagggtatgagggttttttgccctaaagaaaggccagggggtcctcccgaaggaaggcttccagggggataccccctgggcccaggagtagcccctttcctccaaaggcctgggtgaaggcttttagccctttggtcctttgggaaggggcgcttttgacctccaaagccagaaggcgccttcccttcttcaagacgaagtcaacctcctggtccctttcccgccagtagtacacctcaaagcccccgtgggggccgtgggccagaaggtgggcgcccacggcggtttccacgagccgccccatgagggcggcgtccgcccacacctcctttggggaaagccccaagaccgccgtgatgagccccgtattaagggccaggagcttggggctcgaggcgcggcgccggaagggctcggcggcgtacttctgcag

SEQ ID NO: 3227 - DNA, 3026 bp, Artificial Sequence
  Description of Artificial Sequence: Synthetic DNA sequence of Thermus aquaticus DNA Polymerase V730H
atgagggggatgctgcccctctttgagcccaagggccgggtcctcctggtggacggccaccacctggcctaccgcaccttccacgccctgaagggcctcaccaccagccggggggagccggtgcaggcggtctacggcttcgccaagagcctcctcaaggccctcaaggaggacggggacgcggtgatcgtggtctttgacgccaaggccccctccttccgccacgaggcctacggggggtacaaggcgggccgggcccccacgccggaggactttccccggcaactcgccctcatcaaggagctggtggacctcctggggctggcgcgcctcgaggtcccgggctacgaggcggacgacgtcctggccagcctggccaagaaggcggaaaaggagggctacgaggtccgcatcctcaccgccgacaaagacctttaccagctcctttccgaccgcatccacgccctccaccccgaggggtacctcatcaccccggcctggctttgggaaaagtacggcctgaggcccgaccagtgggccgactaccgggccctgaccggggacgagtccgacaaccttcccggggtcaagggcatcggggagaagacggcgaggaagcttctggaggagtgggggagcctggaagccctcctcaagaacctggaccggctgaagcccgccatccgggagaagatcctggcccacatggacgatctgaagctctcctgggacctggccaaggtgcgcaccgacctgcccctggaggtggacttcgccaaaaggcgggagcccgaccgggagaggcttagggcctttctggagaggcttgagtttggcagcctcctccacgagttcggccttctggaaagccccaaggccctggaggaggccccctggcccccgccggaaggggccttcgtgggctttgtgctttcccgcaaggagcccatgtgggccgatcttctggccctggccgccgccagggggggccgggtccaccgggcccccgagccttataaagccctcagggacctgaaggaggcgcgggggcttctcgccaaagacctgagcgttctggccctgagggaaggccttggcctcccgcccggcgacgaccccatgctcctcgcctacctcctggacccttccaacaccacccccgagggggtggcccggcgctacggcggggagtggacggaggaggcgggggagcgggccgccctttccgagaggctcttcgccaacctgtgggggaggcttgagggggaggagaggctcctttggctttaccgggaggtggagaggcccctttccgctgtcctggcccacatggaggccacgggggtgcgcctggacgtggcctatctcagggccttgtccctggaggtggccgaggagatcgcccgcctcgaggccgaggtcttccgcctggccggccaccccttcaacctcaactcccgggaccagctggaaagggtcctctttgacgagctagggcttcccgccatcggcaagacggagaagaccggcaagcgctccaccagcgccgccgtcctggaggccctccgcgaggcccaccccatcgtggagaagatcctgcagtaccgggagctcaccaagctgaagagcacctacattgaccccttgccggacctcatccaccccaggacgggccgcctccacacccgcttcaaccagacggccacggccacgggcaggctaagtagctccgatcccaacctccagaacatccccgtccgcaccccgcttgggcagaggatccgccgggccttcatcgccgaggaggggtggctattggtggccctggactatagccagatagagctcagggtgctggcccacctctccggcgacgagaacctgatccgggtcttccaggaggggcgggacatccacacggagaccgccagctggatgttcggcgtcccccgggaggccgtggaccccctgatgcgccgggcggccaagaccatcaacttcggggtcctctacggcatgtcggcccaccgcctctcccaggagctagccatcccttacgaggaggcccaggccttcattgagcgctactttcagagcttccccaaggtgcgggcctggattgagaagaccctggaggagggcaggaggcgggggtacgtggagaccctcttcggccgccgccgctaccatccagacctagaggcccgggtgaagagcgtgcgggaggcggccgagcgcatggccttcaacatgcccgtccagggcaccgccgccgacctcatgaagctggctatggtgaagctcttccccaggctggaggaaatgggggccaggatgctccttcaggtccacgacgagctggtcctcgaggccccaaaagagagggcggaggccgtggcccggctggccaaggaggtcatggagggggtgtatcccctggccgtgcccctggaggtggaggtggggataggggaggactggctctccgccaaggagtgataccaccccatgctggcccaagccagcatgggggccccggcaaaaggtttctggggaagttaccaggcatggtgggccgaaggaaacaggaaacaagggtatgagggttttttgccctaaagaaaggccagggggtcctcccgaaggaaggcttccagggggataccccctgggcccaggagtagcccctttcctccaaaggcctgggtgaaggcttttagccctttggtcctttgggaaggggcgcttttgacctccaaagccagaaggcgccttcccttcttcaagacgaagtcaacctcctggtccctttcccgccagtagtacacctcaaagcccccgtgggggccgtgggccagaaggtgggcgcccacggcggtttccacgagccgccccatgagggcggcgtccgcccacacctcctttggggaaagccccaagaccgccgtgatgagccccgtattaagggccaggagcttggggctcgaggcgcggcgccggaagggctcggcggcgtacttctgcag

SEQ ID NO: 3228 - DNA, 3026 bp, Artificial Sequence
  Description of Artificial Sequence: Synthetic DNA sequence of Thermus aquaticus DNA Polymerase V730I
atgagggggatgctgcccctctttgagcccaagggccgggtcctcctggtggacggccaccacctggcctaccgcaccttccacgccctgaagggcctcaccaccagccggggggagccggtgcaggcggtctacggcttcgccaagagcctcctcaaggccctcaaggaggacggggacgcggtgatcgtggtctttgacgccaaggccccctccttccgccacgaggcctacggggggtacaaggcgggccgggcccccacgccggaggactttccccggcaactcgccctcatcaaggagctggtggacctcctggggctggcgcgcctcgaggtcccgggctacgaggcggacgacgtcctggccagcctggccaagaaggcggaaaaggagggctacgaggtccgcatcctcaccgccgacaaagacctttaccagctcctttccgaccgcatccacgccctccaccccgaggggtacctcatcaccccggcctggctttgggaaaagtacggcctgaggcccgaccagtgggccgactaccgggccctgaccggggacgagtccgacaaccttcccggggtcaagggcatcggggagaagacggcgaggaagcttctggaggagtgggggagcctggaagccctcctcaagaacctggaccggctgaagcccgccatccgggagaagatcctggcccacatggacgatctgaagctctcctgggacctggccaaggtgcgcaccgacctgcccctggaggtggacttcgccaaaaggcgggagcccgaccgggagaggcttagggcctttctggagaggcttgagtttggcagcctcctccacgagttcggccttctggaaagccccaaggccctggaggaggccccctggcccccgccggaaggggccttcgtgggctttgtgctttcccgcaaggagcccatgtgggccgatcttctggccctggccgccgccagggggggccgggtccaccgggcccccgagccttataaagccctcagggacctgaaggaggcgcgggggcttctcgccaaagacctgagcgttctggccctgagggaaggccttggcctcccgcccggcgacgaccccatgctcctcgcctacctcctggacccttccaacaccacccccgagggggtggcccggcgctacggcggggagtggacggaggaggcgggggagcgggccgccctttccgagaggctcttcgccaacctgtgggggaggcttgagggggaggagaggctcctttggctttaccgggaggtggagaggcccctttccgctgtcctggcccacatggaggccacgggggtgcgcctggacgtggcctatctcagggccttgtccctggaggtggccgaggagatcgcccgcctcgaggccgaggtcttccgcctggccggccaccccttcaacctcaactcccgggaccagctggaaagggtcctctttgacgagctagggcttcccgccatcggcaagacggagaagaccggcaagcgctccaccagcgccgccgtcctggaggccctccgcgaggcccaccccatcgtggagaagatcctgcagtaccgggagctcaccaagctgaagagcacctacattgaccccttgccggacctcatccaccccaggacgggccgcctccacacccgcttcaaccagacggccacggccacgggcaggctaagtagctccgatcccaacctccagaacatccccgtccgcaccccgcttgggcagaggatccgccgggccttcatcgccgaggaggggtggctattggtggccctggactatagccagatagagctcagggtgctggcccacctctccggcgacgagaacctgatccgggtcttccaggaggggcgggacatccacacggagaccgccagctggatgttcggcgtcccccgggaggccgtggaccccctgatgcgccgggcggccaagaccatcaacttcggggtcctctacggcatgtcggcccaccgcctctcccaggagctagccatcccttacgaggaggcccaggccttcattgagcgctactttcagagcttccccaaggtgcgggcctggattgagaagaccctggaggagggcaggaggcgggggtacgtggagaccctcttcggccgccgccgctacattccagacctagaggcccgggtgaagagcgtgcgggaggcggccgagcgcatggccttcaacatgcccgtccagggcaccgccgccgacctcatgaagctggctatggtgaagctcttccccaggctggaggaaatgggggccaggatgctccttcaggtccacgacgagctggtcctcgaggccccaaaagagagggcggaggccgtggcccggctggccaaggaggtcatggagggggtgtatcccctggccgtgcccctggaggtggaggtggggataggggaggactggctctccgccaaggagtgataccaccccatgctggcccaagccagcatgggggccccggcaaaaggtttctggggaagttaccaggcatggtgggccgaaggaaacaggaaacaagggtatgagggttttttgccctaaagaaaggccagggggtcctcccgaaggaaggcttccagggggataccccctgggcccaggagtagcccctttcctccaaaggcctgggtgaaggcttttagccctttggtcctttgggaaggggcgcttttgacctccaaagccagaaggcgccttcccttcttcaagacgaagtcaacctcctggtccctttcccgccagtagtacacctcaaagcccccgtgggggccgtgggccagaaggtgggcgcccacggcggtttccacgagccgccccatgagggcggcgtccgcccacacctcctttggggaaagccccaagaccgccgtgatgagccccgtattaagggccaggagcttggggctcgaggcgcggcgccggaagggctcggcggcgtacttctgcag

SEQ ID NO: 3229 - DNA, 3026 bp, Artificial Sequence
  Description of Artificial Sequence: Synthetic DNA sequence of Thermus aquaticus DNA Polymerase V730L
atgagggggatgctgcccctctttgagcccaagggccgggtcctcctggtggacggccaccacctggcctaccgcaccttccacgccctgaagggcctcaccaccagccggggggagccggtgcaggcggtctacggcttcgccaagagcctcctcaaggccctcaaggaggacggggacgcggtgatcgtggtctttgacgccaaggccccctccttccgccacgaggcctacggggggtacaaggcgggccgggcccccacgccggaggactttccccggcaactcgccctcatcaaggagctggtggacctcctggggctggcgcgcctcgaggtcccgggctacgaggcggacgacgtcctggccagcctggccaagaaggcggaaaaggagggctacgaggtccgcatcctcaccgccgacaaagacctttaccagctcctttccgaccgcatccacgccctccaccccgaggggtacctcatcaccccggcctggctttgggaaaagtacggcctgaggcccgaccagtgggccgactaccgggccctgaccggggacgagtccgacaaccttcccggggtcaagggcatcggggagaagacggcgaggaagcttctggaggagtgggggagcctggaagccctcctcaagaacctggaccggctgaagcccgccatccgggagaagatcctggcccacatggacgatctgaagctctcctgggacctggccaaggtgcgcaccgacctgcccctggaggtggacttcgccaaaaggcgggagcccgaccgggagaggcttagggcctttctggagaggcttgagtttggcagcctcctccacgagttcggccttctggaaagccccaaggccctggaggaggccccctggcccccgccggaaggggccttcgtgggctttgtgctttcccgcaaggagcccatgtgggccgatcttctggccctggccgccgccagggggggccgggtccaccgggcccccgagccttataaagccctcagggacctgaaggaggcgcgggggcttctcgccaaagacctgagcgttctggccctgagggaaggccttggcctcccgcccggcgacgaccccatgctcctcgcctacctcctggacccttccaacaccacccccgagggggtggcccggcgctacggcggggagtggacggaggaggcgggggagcgggccgccctttccgagaggctcttcgccaacctgtgggggaggcttgagggggaggagaggctcctttggctttaccgggaggtggagaggcccctttccgctgtcctggcccacatggaggccacgggggtgcgcctggacgtggcctatctcagggccttgtccctggaggtggccgaggagatcgcccgcctcgaggccgaggtcttccgcctggccggccaccccttcaacctcaactcccgggaccagctggaaagggtcctctttgacgagctagggcttcccgccatcggcaagacggagaagaccggcaagcgctccaccagcgccgccgtcctggaggccctccgcgaggcccaccccatcgtggagaagatcctgcagtaccgggagctcaccaagctgaagagcacctacattgaccccttgccggacctcatccaccccaggacgggccgcctccacacccgcttcaaccagacggccacggccacgggcaggctaagtagctccgatcccaacctccagaacatccccgtccgcaccccgcttgggcagaggatccgccgggccttcatcgccgaggaggggtggctattggtggccctggactatagccagatagagctcagggtgctggcccacctctccggcgacgagaacctgatccgggtcttccaggaggggcgggacatccacacggagaccgccagctggatgttcggcgtcccccgggaggccgtggaccccctgatgcgccgggcggccaagaccatcaacttcggggtcctctacggcatgtcggcccaccgcctctcccaggagctagccatcccttacgaggaggcccaggccttcattgagcgctactttcagagcttccccaaggtgcgggcctggattgagaagaccctggaggagggcaggaggcgggggtacgtggagaccctcttcggccgccgccgctacttaccagacctagaggcccgggtgaagagcgtgcgggaggcggccgagcgcatggccttcaacatgcccgtccagggcaccgccgccgacctcatgaagctggctatggtgaagctcttccccaggctggaggaaatgggggccaggatgctccttcaggtccacgacgagctggtcctcgaggccccaaaagagagggcggaggccgtggcccggctggccaaggaggtcatggagggggtgtatcccctggccgtgcccctggaggtggaggtggggataggggaggactggctctccgccaaggagtgataccaccccatgctggcccaagccagcatgggggccccggcaaaaggtttctggggaagttaccaggcatggtgggccgaaggaaacaggaaacaagggtatgagggttttttgccctaaagaaaggccagggggtcctcccgaaggaaggcttccagggggataccccctgggcccaggagtagcccctttcctccaaaggcctgggtgaaggcttttagccctttggtcctttgggaaggggcgcttttgacctccaaagccagaaggcgccttcccttcttcaagacgaagtcaacctcctggtccctttcccgccagtagtacacctcaaagcccccgtgggggccgtgggccagaaggtgggcgcccacggcggtttccacgagccgccccatgagggcggcgtccgcccacacctcctttggggaaagccccaagaccgccgtgatgagccccgtattaagggccaggagcttggggctcgaggcgcggcgccggaagggctcggcggcgtacttctgcag

SEQ ID NO: 3230 - DNA, 3026 bp, Artificial Sequence
  Description of Artificial Sequence: Synthetic DNA sequence of Thermus aquaticus DNA Polymerase V730K
atgagggggatgctgcccctctttgagcccaagggccgggtcctcctggtggacggccaccacctggcctaccgcaccttccacgccctgaagggcctcaccaccagccggggggagccggtgcaggcggtctacggcttcgccaagagcctcctcaaggccctcaaggaggacggggacgcggtgatcgtggtctttgacgccaaggccccctccttccgccacgaggcctacggggggtacaaggcgggccgggcccccacgccggaggactttccccggcaactcgccctcatcaaggagctggtggacctcctggggctggcgcgcctcgaggtcccgggctacgaggcggacgacgtcctggccagcctggccaagaaggcggaaaaggagggctacgaggtccgcatcctcaccgccgacaaagacctttaccagctcctttccgaccgcatccacgccctccaccccgaggggtacctcatcaccccggcctggctttgggaaaagtacggcctgaggcccgaccagtgggccgactaccgggccctgaccggggacgagtccgacaaccttcccggggtcaagggcatcggggagaagacggcgaggaagcttctggaggagtgggggagcctggaagccctcctcaagaacctggaccggctgaagcccgccatccgggagaagatcctggcccacatggacgatctgaagctctcctgggacctggccaaggtgcgcaccgacctgcccctggaggtggacttcgccaaaaggcgggagcccgaccgggagaggcttagggcctttctggagaggcttgagtttggcagcctcctccacgagttcggccttctggaaagccccaaggccctggaggaggccccctggcccccgccggaaggggccttcgtgggctttgtgctttcccgcaaggagcccatgtgggccgatcttctggccctggccgccgccagggggggccgggtccaccgggcccccgagccttataaagccctcagggacctgaaggaggcgcgggggcttctcgccaaagacctgagcgttctggccctgagggaaggccttggcctcccgcccggcgacgaccccatgctcctcgcctacctcctggacccttccaacaccacccccgagggggtggcccggcgctacggcggggagtggacggaggaggcgggggagcgggccgccctttccgagaggctcttcgccaacctgtgggggaggcttgagggggaggagaggctcctttggctttaccgggaggtggagaggcccctttccgctgtcctggcccacatggaggccacgggggtgcgcctggacgtggcctatctcagggccttgtccctggaggtggccgaggagatcgcccgcctcgaggccgaggtcttccgcctggccggccaccccttcaacctcaactcccgggaccagctggaaagggtcctctttgacgagctagggcttcccgccatcggcaagacggagaagaccggcaagcgctccaccagcgccgccgtcctggaggccctccgcgaggcccaccccatcgtggagaagatcctgcagtaccgggagctcaccaagctgaagagcacctacattgaccccttgccggacctcatccaccccaggacgggccgcctccacacccgcttcaaccagacggccacggccacgggcaggctaagtagctccgatcccaacctccagaacatccccgtccgcaccccgcttgggcagaggatccgccgggccttcatcgccgaggaggggtggctattggtggccctggactatagccagatagagctcagggtgctggcccacctctccggcgacgagaacctgatccgggtcttccaggaggggcgggacatccacacggagaccgccagctggatgttcggcgtcccccgggaggccgtggaccccctgatgcgccgggcggccaagaccatcaacttcggggtcctctacggcatgtcggcccaccgcctctcccaggagctagccatcccttacgaggaggcccaggccttcattgagcgctactttcagagcttccccaaggtgcgggcctggattgagaagaccctggaggagggcaggaggcgggggtacgtggagaccctcttcggccgccgccgctacaaaccagacctagaggcccgggtgaagagcgtgcgggaggcggccgagcgcatggccttcaacatgcccgtccagggcaccgccgccgacctcatgaagctggctatggtgaagctcttccccaggctggaggaaatgggggccaggatgctccttcaggtccacgacgagctggtcctcgaggccccaaaagagagggcggaggccgtggcccggctggccaaggaggtcatggagggggtgtatcccctggccgtgcccctggaggtggaggtggggataggggaggactggctctccgccaaggagtgataccaccccatgctggcccaagccagcatgggggccccggcaaaaggtttctggggaagttaccaggcatggtgggccgaaggaaacaggaaacaagggtatgagggttttttgccctaaagaaaggccagggggtcctcccgaaggaaggcttccagggggataccccctgggcccaggagtagcccctttcctccaaaggcctgggtgaaggcttttagccctttggtcctttgggaaggggcgcttttgacctccaaagccagaaggcgccttcccttcttcaagacgaagtcaacctcctggtccctttcccgccagtagtacacctcaaagcccccgtgggggccgtgggccagaaggtgggcgcccacggcggtttccacgagccgccccatgagggcggcgtccgcccacacctcctttggggaaagccccaagaccgccgtgatgagccccgtattaagggccaggagcttggggctcgaggcgcggcgccggaagggctcggcggcgtacttctgcag

SEQ ID NO: 3231 - DNA, 3026 bp, Artificial Sequence
  Description of Artificial Sequence: Synthetic DNA sequence of Thermus aquaticus DNA Polymerase V730E
atgagggggatgctgcccctctttgagcccaagggccgggtcctcctggtggacggccaccacctggcctaccgcaccttccacgccctgaagggcctcaccaccagccggggggagccggtgcaggcggtctacggcttcgccaagagcctcctcaaggccctcaaggaggacggggacgcggtgatcgtggtctttgacgccaaggccccctccttccgccacgaggcctacggggggtacaaggcgggccgggcccccacgccggaggactttccccggcaactcgccctcatcaaggagctggtggacctcctggggctggcgcgcctcgaggtcccgggctacgaggcggacgacgtcctggccagcctggccaagaaggcggaaaaggagggctacgaggtccgcatcctcaccgccgacaaagacctttaccagctcctttccgaccgcatccacgccctccaccccgaggggtacctcatcaccccggcctggctttgggaaaagtacggcctgaggcccgaccagtgggccgactaccgggccctgaccggggacgagtccgacaaccttcccggggtcaagggcatcggggagaagacggcgaggaagcttctggaggagtgggggagcctggaagccctcctcaagaacctggaccggctgaagcccgccatccgggagaagatcctggcccacatggacgatctgaagctctcctgggacctggccaaggtgcgcaccgacctgcccctggaggtggacttcgccaaaaggcgggagcccgaccgggagaggcttagggcctttctggagaggcttgagtttggcagcctcctccacgagttcggccttctggaaagccccaaggccctggaggaggccccctggcccccgccggaaggggccttcgtgggctttgtgctttcccgcaaggagcccatgtgggccgatcttctggccctggccgccgccagggggggccgggtccaccgggcccccgagccttataaagccctcagggacctgaaggaggcgcgggggcttctcgccaaagacctgagcgttctggccctgagggaaggccttggcctcccgcccggcgacgaccccatgctcctcgcctacctcctggacccttccaacaccacccccgagggggtggcccggcgctacggcggggagtggacggaggaggcgggggagcgggccgccctttccgagaggctcttcgccaacctgtgggggaggcttgagggggaggagaggctcctttggctttaccgggaggtggagaggcccctttccgctgtcctggcccacatggaggccacgggggtgcgcctggacgtggcctatctcagggccttgtccctggaggtggccgaggagatcgcccgcctcgaggccgaggtcttccgcctggccggccaccccttcaacctcaactcccgggaccagctggaaagggtcctctttgacgagctagggcttcccgccatcggcaagacggagaagaccggcaagcgctccaccagcgccgccgtcctggaggccctccgcgaggcccaccccatcgtggagaagatcctgcagtaccgggagctcaccaagctgaagagcacctacattgaccccttgccggacctcatccaccccaggacgggccgcctccacacccgcttcaaccagacggccacggccacgggcaggctaagtagctccgatcccaacctccagaacatccccgtccgcaccccgcttgggcagaggatccgccgggccttcatcgccgaggaggggtggctattggtggccctggactatagccagatagagctcagggtgctggcccacctctccggcgacgagaacctgatccgggtcttccaggaggggcgggacatccacacggagaccgccagctggatgttcggcgtcccccgggaggccgtggaccccctgatgcgccgggcggccaagaccatcaacttcggggtcctctacggcatgtcggcccaccgcctctcccaggagctagccatcccttacgaggaggcccaggccttcattgagcgctactttcagagcttccccaaggtgcgggcctggattgagaagaccctggaggagggcaggaggcgggggtacgtggagaccctcttcggccgccgccgctacgaaccagacctagaggcccgggtgaagagcgtgcgggaggcggccgagcgcatggccttcaacatgcccgtccagggcaccgccgccgacctcatgaagctggctatggtgaagctcttccccaggctggaggaaatgggggccaggatgctccttcaggtccacgacgagctggtcctcgaggccccaaaagagagggcggaggccgtggcccggctggccaaggaggtcatggagggggtgtatcccctggccgtgcccctggaggtggaggtggggataggggaggactggctctccgccaaggagtgataccaccccatgctggcccaagccagcatgggggccccggcaaaaggtttctggggaagttaccaggcatggtgggccgaaggaaacaggaaacaagggtatgagggttttttgccctaaagaaaggccagggggtcctcccgaaggaaggcttccagggggataccccctgggcccaggagtagcccctttcctccaaaggcctgggtgaaggcttttagccctttggtcctttgggaaggggcgcttttgacctccaaagccagaaggcgccttcccttcttcaagacgaagtcaacctcctggtccctttcccgccagtagtacacctcaaagcccccgtgggggccgtgggccagaaggtgggcgcccacggcggtttccacgagccgccccatgagggcggcgtccgcccacacctcctttggggaaagccccaagaccgccgtgatgagccccgtattaagggccaggagcttggggctcgaggcgcggcgccggaagggctcggcggcgtacttctgcag

SEQ ID NO: 3232 - DNA, 3026 bp, Artificial Sequence
  Description of Artificial Sequence: Synthetic DNA sequence of Thermus aquaticus DNA Polymerase V730D
atgagggggatgctgcccctctttgagcccaagggccgggtcctcctggtggacggccaccacctggcctaccgcaccttccacgccctgaagggcctcaccaccagccggggggagccggtgcaggcggtctacggcttcgccaagagcctcctcaaggccctcaaggaggacggggacgcggtgatcgtggtctttgacgccaaggccccctccttccgccacgaggcctacggggggtacaaggcgggccgggcccccacgccggaggactttccccggcaactcgccctcatcaaggagctggtggacctcctggggctggcgcgcctcgaggtcccgggctacgaggcggacgacgtcctggccagcctggccaagaaggcggaaaaggagggctacgaggtccgcatcctcaccgccgacaaagacctttaccagctcctttccgaccgcatccacgccctccaccccgaggggtacctcatcaccccggcctggctttgggaaaagtacggcctgaggcccgaccagtgggccgactaccgggccctgaccggggacgagtccgacaaccttcccggggtcaagggcatcggggagaagacggcgaggaagcttctggaggagtgggggagcctggaagccctcctcaagaacctggaccggctgaagcccgccatccgggagaagatcctggcccacatggacgatctgaagctctcctgggacctggccaaggtgcgcaccgacctgcccctggaggtggacttcgccaaaaggcgggagcccgaccgggagaggcttagggcctttctggagaggcttgagtttggcagcctcctccacgagttcggccttctggaaagccccaaggccctggaggaggccccctggcccccgccggaaggggccttcgtgggctttgtgctttcccgcaaggagcccatgtgggccgatcttctggccctggccgccgccagggggggccgggtccaccgggcccccgagccttataaagccctcagggacctgaaggaggcgcgggggcttctcgccaaagacctgagcgttctggccctgagggaaggccttggcctcccgcccggcgacgaccccatgctcctcgcctacctcctggacccttccaacaccacccccgagggggtggcccggcgctacggcggggagtggacggaggaggcgggggagcgggccgccctttccgagaggctcttcgccaacctgtgggggaggcttgagggggaggagaggctcctttggctttaccgggaggtggagaggcccctttccgctgtcctggcccacatggaggccacgggggtgcgcctggacgtggcctatctcagggccttgtccctggaggtggccgaggagatcgcccgcctcgaggccgaggtcttccgcctggccggccaccccttcaacctcaactcccgggaccagctggaaagggtcctctttgacgagctagggcttcccgccatcggcaagacggagaagaccggcaagcgctccaccagcgccgccgtcctggaggccctccgcgaggcccaccccatcgtggagaagatcctgcagtaccgggagctcaccaagctgaagagcacctacattgaccccttgccggacctcatccaccccaggacgggccgcctccacacccgcttcaaccagacggccacggccacgggcaggctaagtagctccgatcccaacctccagaacatccccgtccgcaccccgcttgggcagaggatccgccgggccttcatcgccgaggaggggtggctattggtggccctggactatagccagatagagctcagggtgctggcccacctctccggcgacgagaacctgatccgggtcttccaggaggggcgggacatccacacggagaccgccagctggatgttcggcgtcccccgggaggccgtggaccccctgatgcgccgggcggccaagaccatcaacttcggggtcctctacggcatgtcggcccaccgcctctcccaggagctagccatcccttacgaggaggcccaggccttcattgagcgctactttcagagcttccccaaggtgcgggcctggattgagaagaccctggaggagggcaggaggcgggggtacgtggagaccctcttcggccgccgccgctacgatccagacctagaggcccgggtgaagagcgtgcgggaggcggccgagcgcatggccttcaacatgcccgtccagggcaccgccgccgacctcatgaagctggctatggtgaagctcttccccaggctggaggaaatgggggccaggatgctccttcaggtccacgacgagctggtcctcgaggccccaaaagagagggcggaggccgtggcccggctggccaaggaggtcatggagggggtgtatcccctggccgtgcccctggaggtggaggtggggataggggaggactggctctccgccaaggagtgataccaccccatgctggcccaagccagcatgggggccccggcaaaaggtttctggggaagttaccaggcatggtgggccgaaggaaacaggaaacaagggtatgagggttttttgccctaaagaaaggccagggggtcctcccgaaggaaggcttccagggggataccccctgggcccaggagtagcccctttcctccaaaggcctgggtgaaggcttttagccctttggtcctttgggaaggggcgcttttgacctccaaagccagaaggcgccttcccttcttcaagacgaagtcaacctcctggtccctttcccgccagtagtacacctcaaagcccccgtgggggccgtgggccagaaggtgggcgcccacggcggtttccacgagccgccccatgagggcggcgtccgcccacacctcctttggggaaagccccaagaccgccgtgatgagccccgtattaagggccaggagcttggggctcgaggcgcggcgccggaagggctcggcggcgtacttctgcag

SEQ ID NO: 3233 - DNA, 3026 bp, Artificial Sequence
  Description of Artificial Sequence: Synthetic DNA sequence of Thermus aquaticus DNA Polymerase V730F
atgagggggatgctgcccctctttgagcccaagggccgggtcctcctggtggacggccaccacctggcctaccgcaccttccacgccctgaagggcctcaccaccagccggggggagccggtgcaggcggtctacggcttcgccaagagcctcctcaaggccctcaaggaggacggggacgcggtgatcgtggtctttgacgccaaggccccctccttccgccacgaggcctacggggggtacaaggcgggccgggcccccacgccggaggactttccccggcaactcgccctcatcaaggagctggtggacctcctggggctggcgcgcctcgaggtcccgggctacgaggcggacgacgtcctggccagcctggccaagaaggcggaaaaggagggctacgaggtccgcatcctcaccgccgacaaagacctttaccagctcctttccgaccgcatccacgccctccaccccgaggggtacctcatcaccccggcctggctttgggaaaagtacggcctgaggcccgaccagtgggccgactaccgggccctgaccggggacgagtccgacaaccttcccggggtcaagggcatcggggagaagacggcgaggaagcttctggaggagtgggggagcctggaagccctcctcaagaacctggaccggctgaagcccgccatccgggagaagatcctggcccacatggacgatctgaagctctcctgggacctggccaaggtgcgcaccgacctgcccctggaggtggacttcgccaaaaggcgggagcccgaccgggagaggcttagggcctttctggagaggcttgagtttggcagcctcctccacgagttcggccttctggaaagccccaaggccctggaggaggccccctggcccccgccggaaggggccttcgtgggctttgtgctttcccgcaaggagcccatgtgggccgatcttctggccctggccgccgccagggggggccgggtccaccgggcccccgagccttataaagccctcagggacctgaaggaggcgcgggggcttctcgccaaagacctgagcgttctggccctgagggaaggccttggcctcccgcccggcgacgaccccatgctcctcgcctacctcctggacccttccaacaccacccccgagggggtggcccggcgctacggcggggagtggacggaggaggcgggggagcgggccgccctttccgagaggctcttcgccaacctgtgggggaggcttgagggggaggagaggctcctttggctttaccgggaggtggagaggcccctttccgctgtcctggcccacatggaggccacgggggtgcgcctggacgtggcctatctcagggccttgtccctggaggtggccgaggagatcgcccgcctcgaggccgaggtcttccgcctggccggccaccccttcaacctcaactcccgggaccagctggaaagggtcctctttgacgagctagggcttcccgccatcggcaagacggagaagaccggcaagcgctccaccagcgccgccgtcctggaggccctccgcgaggcccaccccatcgtggagaagatcctgcagtaccgggagctcaccaagctgaagagcacctacattgaccccttgccggacctcatccaccccaggacgggccgcctccacacccgcttcaaccagacggccacggccacgggcaggctaagtagctccgatcccaacctccagaacatccccgtccgcaccccgcttgggcagaggatccgccgggccttcatcgccgaggaggggtggctattggtggccctggactatagccagatagagctcagggtgctggcccacctctccggcgacgagaacctgatccgggtcttccaggaggggcgggacatccacacggagaccgccagctggatgttcggcgtcccccgggaggccgtggaccccctgatgcgccgggcggccaagaccatcaacttcggggtcctctacggcatgtcggcccaccgcctctcccaggagctagccatcccttacgaggaggcccaggccttcattgagcgctactttcagagcttccccaaggtgcgggcctggattgagaagaccctggaggagggcaggaggcgggggtacgtggagaccctcttcggccgccgccgctactttccagacctagaggcccgggtgaagagcgtgcgggaggcggccgagcgcatggccttcaacatgcccgtccagggcaccgccgccgacctcatgaagctggctatggtgaagctcttccccaggctggaggaaatgggggccaggatgctccttcaggtccacgacgagctggtcctcgaggccccaaaagagagggcggaggccgtggcccggctggccaaggaggtcatggagggggtgtatcccctggccgtgcccctggaggtggaggtggggataggggaggactggctctccgccaaggagtgataccaccccatgctggcccaagccagcatgggggccccggcaaaaggtttctggggaagttaccaggcatggtgggccgaaggaaacaggaaacaagggtatgagggttttttgccctaaagaaaggccagggggtcctcccgaaggaaggcttccagggggataccccctgggcccaggagtagcccctttcctccaaaggcctgggtgaaggcttttagccctttggtcctttgggaaggggcgcttttgacctccaaagccagaaggcgccttcccttcttcaagacgaagtcaacctcctggtccctttcccgccagtagtacacctcaaagcccccgtgggggccgtgggccagaaggtgggcgcccacggcggtttccacgagccgccccatgagggcggcgtccgcccacacctcctttggggaaagccccaagaccgccgtgatgagccccgtattaagggccaggagcttggggctcgaggcgcggcgccggaagggctcggcggcgtacttctgcag

SEQ ID NO: 3234 - DNA, 3026 bp, Artificial Sequence
  Description of Artificial Sequence: Synthetic DNA sequence of Thermus aquaticus DNA Polymerase V730S
atgagggggatgctgcccctctttgagcccaagggccgggtcctcctggtggacggccaccacctggcctaccgcaccttccacgccctgaagggcctcaccaccagccggggggagccggtgcaggcggtctacggcttcgccaagagcctcctcaaggccctcaaggaggacggggacgcggtgatcgtggtctttgacgccaaggccccctccttccgccacgaggcctacggggggtacaaggcgggccgggcccccacgccggaggactttccccggcaactcgccctcatcaaggagctggtggacctcctggggctggcgcgcctcgaggtcccgggctacgaggcggacgacgtcctggccagcctggccaagaaggcggaaaaggagggctacgaggtccgcatcctcaccgccgacaaagacctttaccagctcctttccgaccgcatccacgccctccaccccgaggggtacctcatcaccccggcctggctttgggaaaagtacggcctgaggcccgaccagtgggccgactaccgggccctgaccggggacgagtccgacaaccttcccggggtcaagggcatcggggagaagacggcgaggaagcttctggaggagtgggggagcctggaagccctcctcaagaacctggaccggctgaagcccgccatccgggagaagatcctggcccacatggacgatctgaagctctcctgggacctggccaaggtgcgcaccgacctgcccctggaggtggacttcgccaaaaggcgggagcccgaccgggagaggcttagggcctttctggagaggcttgagtttggcagcctcctccacgagttcggccttctggaaagccccaaggccctggaggaggccccctggcccccgccggaaggggccttcgtgggctttgtgctttcccgcaaggagcccatgtgggccgatcttctggccctggccgccgccagggggggccgggtccaccgggcccccgagccttataaagccctcagggacctgaaggaggcgcgggggcttctcgccaaagacctgagcgttctggccctgagggaaggccttggcctcccgcccggcgacgaccccatgctcctcgcctacctcctggacccttccaacaccacccccgagggggtggcccggcgctacggcggggagtggacggaggaggcgggggagcgggccgccctttccgagaggctcttcgccaacctgtgggggaggcttgagggggaggagaggctcctttggctttaccgggaggtggagaggcccctttccgctgtcctggcccacatggaggccacgggggtgcgcctggacgtggcctatctcagggccttgtccctggaggtggccgaggagatcgcccgcctcgaggccgaggtcttccgcctggccggccaccccttcaacctcaactcccgggaccagctggaaagggtcctctttgacgagctagggcttcccgccatcggcaagacggagaagaccggcaagcgctccaccagcgccgccgtcctggaggccctccgcgaggcccaccccatcgtggagaagatcctgcagtaccgggagctcaccaagctgaagagcacctacattgaccccttgccggacctcatccaccccaggacgggccgcctccacacccgcttcaaccagacggccacggccacgggcaggctaagtagctccgatcccaacctccagaacatccccgtccgcaccccgcttgggcagaggatccgccgggccttcatcgccgaggaggggtggctattggtggccctggactatagccagatagagctcagggtgctggcccacctctccggcgacgagaacctgatccgggtcttccaggaggggcgggacatccacacggagaccgccagctggatgttcggcgtcccccgggaggccgtggaccccctgatgcgccgggcggccaagaccatcaacttcggggtcctctacggcatgtcggcccaccgcctctcccaggagctagccatcccttacgaggaggcccaggccttcattgagcgctactttcagagcttccccaaggtgcgggcctggattgagaagaccctggaggagggcaggaggcgggggtacgtggagaccctcttcggccgccgccgctactctccagacctagaggcccgggtgaagagcgtgcgggaggcggccgagcgcatggccttcaacatgcccgtccagggcaccgccgccgacctcatgaagctggctatggtgaagctcttccccaggctggaggaaatgggggccaggatgctccttcaggtccacgacgagctggtcctcgaggccccaaaagagagggcggaggccgtggcccggctggccaaggaggtcatggagggggtgtatcccctggccgtgcccctggaggtggaggtggggataggggaggactggctctccgccaaggagtgataccaccccatgctggcccaagccagcatgggggccccggcaaaaggtttctggggaagttaccaggcatggtgggccgaaggaaacaggaaacaagggtatgagggttttttgccctaaagaaaggccagggggtcctcccgaaggaaggcttccagggggataccccctgggcccaggagtagcccctttcctccaaaggcctgggtgaaggcttttagccctttggtcctttgggaaggggcgcttttgacctccaaagccagaaggcgccttcccttcttcaagacgaagtcaacctcctggtccctttcccgccagtagtacacctcaaagcccccgtgggggccgtgggccagaaggtgggcgcccacggcggtttccacgagccgccccatgagggcggcgtccgcccacacctcctttggggaaagccccaagaccgccgtgatgagccccgtattaagggccaggagcttggggctcgaggcgcggcgccggaagggctcggcggcgtacttctgcag

SEQ ID NO: 3235 - DNA, 3026 bp, Artificial Sequence
  Description of Artificial Sequence: Synthetic DNA sequence of Thermus aquaticus DNA Polymerase V730Y
atgagggggatgctgcccctctttgagcccaagggccgggtcctcctggtggacggccaccacctggcctaccgcaccttccacgccctgaagggcctcaccaccagccggggggagccggtgcaggcggtctacggcttcgccaagagcctcctcaaggccctcaaggaggacggggacgcggtgatcgtggtctttgacgccaaggccccctccttccgccacgaggcctacggggggtacaaggcgggccgggcccccacgccggaggactttccccggcaactcgccctcatcaaggagctggtggacctcctggggctggcgcgcctcgaggtcccgggctacgaggcggacgacgtcctggccagcctggccaagaaggcggaaaaggagggctacgaggtccgcatcctcaccgccgacaaagacctttaccagctcctttccgaccgcatccacgccctccaccccgaggggtacctcatcaccccggcctggctttgggaaaagtacggcctgaggcccgaccagtgggccgactaccgggccctgaccggggacgagtccgacaaccttcccggggtcaagggcatcggggagaagacggcgaggaagcttctggaggagtgggggagcctggaagccctcctcaagaacctggaccggctgaagcccgccatccgggagaagatcctggcccacatggacgatctgaagctctcctgggacctggccaaggtgcgcaccgacctgcccctggaggtggacttcgccaaaaggcgggagcccgaccgggagaggcttagggcctttctggagaggcttgagtttggcagcctcctccacgagttcggccttctggaaagccccaaggccctggaggaggccccctggcccccgccggaaggggccttcgtgggctttgtgctttcccgcaaggagcccatgtgggccgatcttctggccctggccgccgccagggggggccgggtccaccgggcccccgagccttataaagccctcagggacctgaaggaggcgcgggggcttctcgccaaagacctgagcgttctggccctgagggaaggccttggcctcccgcccggcgacgaccccatgctcctcgcctacctcctggacccttccaacaccacccccgagggggtggcccggcgctacggcggggagtggacggaggaggcgggggagcgggccgccctttccgagaggctcttcgccaacctgtgggggaggcttgagggggaggagaggctcctttggctttaccgggaggtggagaggcccctttccgctgtcctggcccacatggaggccacgggggtgcgcctggacgtggcctatctcagggccttgtccctggaggtggccgaggagatcgcccgcctcgaggccgaggtcttccgcctggccggccaccccttcaacctcaactcccgggaccagctggaaagggtcctctttgacgagctagggcttcccgccatcggcaagacggagaagaccggcaagcgctccaccagcgccgccgtcctggaggccctccgcgaggcccaccccatcgtggagaagatcctgcagtaccgggagctcaccaagctgaagagcacctacattgaccccttgccggacctcatccaccccaggacgggccgcctccacacccgcttcaaccagacggccacggccacgggcaggctaagtagctccgatcccaacctccagaacatccccgtccgcaccccgcttgggcagaggatccgccgggccttcatcgccgaggaggggtggctattggtggccctggactatagccagatagagctcagggtgctggcccacctctccggcgacgagaacctgatccgggtcttccaggaggggcgggacatccacacggagaccgccagctggatgttcggcgtcccccgggaggccgtggaccccctgatgcgccgggcggccaagaccatcaacttcggggtcctctacggcatgtcggcccaccgcctctcccaggagctagccatcccttacgaggaggcccaggccttcattgagcgctactttcagagcttccccaaggtgcgggcctggattgagaagaccctggaggagggcaggaggcgggggtacgtggagaccctcttcggccgccgccgctactatccagacctagaggcccgggtgaagagcgtgcgggaggcggccgagcgcatggccttcaacatgcccgtccagggcaccgccgccgacctcatgaagctggctatggtgaagctcttccccaggctggaggaaatgggggccaggatgctccttcaggtccacgacgagctggtcctcgaggccccaaaagagagggcggaggccgtggcccggctggccaaggaggtcatggagggggtgtatcccctggccgtgcccctggaggtggaggtggggataggggaggactggctctccgccaaggagtgataccaccccatgctggcccaagccagcatgggggccccggcaaaaggtttctggggaagttaccaggcatggtgggccgaaggaaacaggaaacaagggtatgagggttttttgccctaaagaaaggccagggggtcctcccgaaggaaggcttccagggggataccccctgggcccaggagtagcccctttcctccaaaggcctgggtgaaggcttttagccctttggtcctttgggaaggggcgcttttgacctccaaagccagaaggcgccttcccttcttcaagacgaagtcaacctcctggtccctttcccgccagtagtacacctcaaagcccccgtgggggccgtgggccagaaggtgggcgcccacggcggtttccacgagccgccccatgagggcggcgtccgcccacacctcctttggggaaagccccaagaccgccgtgatgagccccgtattaagggccaggagcttggggctcgaggcgcggcgccggaagggctcggcggcgtacttctgcag

SEQ ID NO: 3236 - DNA, 3026 bp, Artificial Sequence
  Description of Artificial Sequence: Synthetic DNA sequence of Thermus aquaticus DNA Polymerase V730W
atgagggggatgctgcccctctttgagcccaagggccgggtcctcctggtggacggccaccacctggcctaccgcaccttccacgccctgaagggcctcaccaccagccggggggagccggtgcaggcggtctacggcttcgccaagagcctcctcaaggccctcaaggaggacggggacgcggtgatcgtggtctttgacgccaaggccccctccttccgccacgaggcctacggggggtacaaggcgggccgggcccccacgccggaggactttccccggcaactcgccctcatcaaggagctggtggacctcctggggctggcgcgcctcgaggtcccgggctacgaggcggacgacgtcctggccagcctggccaagaaggcggaaaaggagggctacgaggtccgcatcctcaccgccgacaaagacctttaccagctcctttccgaccgcatccacgccctccaccccgaggggtacctcatcaccccggcctggctttgggaaaagtacggcctgaggcccgaccagtgggccgactaccgggccctgaccggggacgagtccgacaaccttcccggggtcaagggcatcggggagaagacggcgaggaagcttctggaggagtgggggagcctggaagccctcctcaagaacctggaccggctgaagcccgccatccgggagaagatcctggcccacatggacgatctgaagctctcctgggacctggccaaggtgcgcaccgacctgcccctggaggtggacttcgccaaaaggcgggagcccgaccgggagaggcttagggcctttctggagaggcttgagtttggcagcctcctccacgagttcggccttctggaaagccccaaggccctggaggaggccccctggcccccgccggaaggggccttcgtgggctttgtgctttcccgcaaggagcccatgtgggccgatcttctggccctggccgccgccagggggggccgggtccaccgggcccccgagccttataaagccctcagggacctgaaggaggcgcgggggcttctcgccaaagacctgagcgttctggccctgagggaaggccttggcctcccgcccggcgacgaccccatgctcctcgcctacctcctggacccttccaacaccacccccgagggggtggcccggcgctacggcggggagtggacggaggaggcgggggagcgggccgccctttccgagaggctcttcgccaacctgtgggggaggcttgagggggaggagaggctcctttggctttaccgggaggtggagaggcccctttccgctgtcctggcccacatggaggccacgggggtgcgcctggacgtggcctatctcagggccttgtccctggaggtggccgaggagatcgcccgcctcgaggccgaggtcttccgcctggccggccaccccttcaacctcaactcccgggaccagctggaaagggtcctctttgacgagctagggcttcccgccatcggcaagacggagaagaccggcaagcgctccaccagcgccgccgtcctggaggccctccgcgaggcccaccccatcgtggagaagatcctgcagtaccgggagctcaccaagctgaagagcacctacattgaccccttgccggacctcatccaccccaggacgggccgcctccacacccgcttcaaccagacggccacggccacgggcaggctaagtagctccgatcccaacctccagaacatccccgtccgcaccccgcttgggcagaggatccgccgggccttcatcgccgaggaggggtggctattggtggccctggactatagccagatagagctcagggtgctggcccacctctccggcgacgagaacctgatccgggtcttccaggaggggcgggacatccacacggagaccgccagctggatgttcggcgtcccccgggaggccgtggaccccctgatgcgccgggcggccaagaccatcaacttcggggtcctctacggcatgtcggcccaccgcctctcccaggagctagccatcccttacgaggaggcccaggccttcattgagcgctactttcagagcttccccaaggtgcgggcctggattgagaagaccctggaggagggcaggaggcgggggtacgtggagaccctcttcggccgccgccgctactggccagacctagaggcccgggtgaagagcgtgcgggaggcggccgagcgcatggccttcaacatgcccgtccagggcaccgccgccgacctcatgaagctggctatggtgaagctcttccccaggctggaggaaatgggggccaggatgctccttcaggtccacgacgagctggtcctcgaggccccaaaagagagggcggaggccgtggcccggctggccaaggaggtcatggagggggtgtatcccctggccgtgcccctggaggtggaggtggggataggggaggactggctctccgccaaggagtgataccaccccatgctggcccaagccagcatgggggccccggcaaaaggtttctggggaagttaccaggcatggtgggccgaaggaaacaggaaacaagggtatgagggttttttgccctaaagaaaggccagggggtcctcccgaaggaaggcttccagggggataccccctgggcccaggagtagcccctttcctccaaaggcctgggtgaaggcttttagccctttggtcctttgggaaggggcgcttttgacctccaaagccagaaggcgccttcccttcttcaagacgaagtcaacctcctggtccctttcccgccagtagtacacctcaaagcccccgtgggggccgtgggccagaaggtgggcgcccacggcggtttccacgagccgccccatgagggcggcgtccgcccacacctcctttggggaaagccccaagaccgccgtgatgagccccgtattaagggccaggagcttggggctcgaggcgcggcgccggaagggctcggcggcgtacttctgcag

SEQ ID NO: 3237 - DNA, 3026 bp, Artificial Sequence
  Description of Artificial Sequence: Synthetic DNA sequence of Thermus aquaticus DNA Polymerase V730P
atgagggggatgctgcccctctttgagcccaagggccgggtcctcctggtggacggccaccacctggcctaccgcaccttccacgccctgaagggcctcaccaccagccggggggagccggtgcaggcggtctacggcttcgccaagagcctcctcaaggccctcaaggaggacggggacgcggtgatcgtggtctttgacgccaaggccccctccttccgccacgaggcctacggggggtacaaggcgggccgggcccccacgccggaggactttccccggcaactcgccctcatcaaggagctggtggacctcctggggctggcgcgcctcgaggtcccgggctacgaggcggacgacgtcctggccagcctggccaagaaggcggaaaaggagggctacgaggtccgcatcctcaccgccgacaaagacctttaccagctcctttccgaccgcatccacgccctccaccccgaggggtacctcatcaccccggcctggctttgggaaaagtacggcctgaggcccgaccagtgggccgactaccgggccctgaccggggacgagtccgacaaccttcccggggtcaagggcatcggggagaagacggcgaggaagcttctggaggagtgggggagcctggaagccctcctcaagaacctggaccggctgaagcccgccatccgggagaagatcctggcccacatggacgatctgaagctctcctgggacctggccaaggtgcgcaccgacctgcccctggaggtggacttcgccaaaaggcgggagcccgaccgggagaggcttagggcctttctggagaggcttgagtttggcagcctcctccacgagttcggccttctggaaagccccaaggccctggaggaggccccctggcccccgccggaaggggccttcgtgggctttgtgctttcccgcaaggagcccatgtgggccgatcttctggccctggccgccgccagggggggccgggtccaccgggcccccgagccttataaagccctcagggacctgaaggaggcgcgggggcttctcgccaaagacctgagcgttctggccctgagggaaggccttggcctcccgcccggcgacgaccccatgctcctcgcctacctcctggacccttccaacaccacccccgagggggtggcccggcgctacggcggggagtggacggaggaggcgggggagcgggccgccctttccgagaggctcttcgccaacctgtgggggaggcttgagggggaggagaggctcctttggctttaccgggaggtggagaggcccctttccgctgtcctggcccacatggaggccacgggggtgcgcctggacgtggcctatctcagggccttgtccctggaggtggccgaggagatcgcccgcctcgaggccgaggtcttccgcctggccggccaccccttcaacctcaactcccgggaccagctggaaagggtcctctttgacgagctagggcttcccgccatcggcaagacggagaagaccggcaagcgctccaccagcgccgccgtcctggaggccctccgcgaggcccaccccatcgtggagaagatcctgcagtaccgggagctcaccaagctgaagagcacctacattgaccccttgccggacctcatccaccccaggacgggccgcctccacacccgcttcaaccagacggccacggccacgggcaggctaagtagctccgatcccaacctccagaacatccccgtccgcaccccgcttgggcagaggatccgccgggccttcatcgccgaggaggggtggctattggtggccctggactatagccagatagagctcagggtgctggcccacctctccggcgacgagaacctgatccgggtcttccaggaggggcgggacatccacacggagaccgccagctggatgttcggcgtcccccgggaggccgtggaccccctgatgcgccgggcggccaagaccatcaacttcggggtcctctacggcatgtcggcccaccgcctctcccaggagctagccatcccttacgaggaggcccaggccttcattgagcgctactttcagagcttccccaaggtgcgggcctggattgagaagaccctggaggagggcaggaggcgggggtacgtggagaccctcttcggccgccgccgctaccctccagacctagaggcccgggtgaagagcgtgcgggaggcggccgagcgcatggccttcaacatgcccgtccagggcaccgccgccgacctcatgaagctggctatggtgaagctcttccccaggctggaggaaatgggggccaggatgctccttcaggtccacgacgagctggtcctcgaggccccaaaagagagggcggaggccgtggcccggctggccaaggaggtcatggagggggtgtatcccctggccgtgcccctggaggtggaggtggggataggggaggactggctctccgccaaggagtgataccaccccatgctggcccaagccagcatgggggccccggcaaaaggtttctggggaagttaccaggcatggtgggccgaaggaaacaggaaacaagggtatgagggttttttgccctaaagaaaggccagggggtcctcccgaaggaaggcttccagggggataccccctgggcccaggagtagcccctttcctccaaaggcctgggtgaaggcttttagccctttggtcctttgggaaggggcgcttttgacctccaaagccagaaggcgccttcccttcttcaagacgaagtcaacctcctggtccctttcccgccagtagtacacctcaaagcccccgtgggggccgtgggccagaaggtgggcgcccacggcggtttccacgagccgccccatgagggcggcgtccgcccacacctcctttggggaaagccccaagaccgccgtgatgagccccgtattaagggccaggagcttggggctcgaggcgcggcgccggaagggctcggcggcgtacttctgcag

SEQ ID NO: 3238 - DNA, 3026 bp, Artificial Sequence
  Description of Artificial Sequence: Synthetic DNA sequence of Thermus aquaticus DNA Polymerase V730M
atgagggggatgctgcccctctttgagcccaagggccgggtcctcctggtggacggccaccacctggcctaccgcaccttccacgccctgaagggcctcaccaccagccggggggagccggtgcaggcggtctacggcttcgccaagagcctcctcaaggccctcaaggaggacggggacgcggtgatcgtggtctttgacgccaaggccccctccttccgccacgaggcctacggggggtacaaggcgggccgggcccccacgccggaggactttccccggcaactcgccctcatcaaggagctggtggacctcctggggctggcgcgcctcgaggtcccgggctacgaggcggacgacgtcctggccagcctggccaagaaggcggaaaaggagggctacgaggtccgcatcctcaccgccgacaaagacctttaccagctcctttccgaccgcatccacgccctccaccccgaggggtacctcatcaccccggcctggctttgggaaaagtacggcctgaggcccgaccagtgggccgactaccgggccctgaccggggacgagtccgacaaccttcccggggtcaagggcatcggggagaagacggcgaggaagcttctggaggagtgggggagcctggaagccctcctcaagaacctggaccggctgaagcccgccatccgggagaagatcctggcccacatggacgatctgaagctctcctgggacctggccaaggtgcgcaccgacctgcccctggaggtggacttcgccaaaaggcgggagcccgaccgggagaggcttagggcctttctggagaggcttgagtttggcagcctcctccacgagttcggccttctggaaagccccaaggccctggaggaggccccctggcccccgccggaaggggccttcgtgggctttgtgctttcccgcaaggagcccatgtgggccgatcttctggccctggccgccgccagggggggccgggtccaccgggcccccgagccttataaagccctcagggacctgaaggaggcgcgggggcttctcgccaaagacctgagcgttctggccctgagggaaggccttggcctcccgcccggcgacgaccccatgctcctcgcctacctcctggacccttccaacaccacccccgagggggtggcccggcgctacggcggggagtggacggaggaggcgggggagcgggccgccctttccgagaggctcttcgccaacctgtgggggaggcttgagggggaggagaggctcctttggctttaccgggaggtggagaggcccctttccgctgtcctggcccacatggaggccacgggggtgcgcctggacgtggcctatctcagggccttgtccctggaggtggccgaggagatcgcccgcctcgaggccgaggtcttccgcctggccggccaccccttcaacctcaactcccgggaccagctggaaagggtcctctttgacgagctagggcttcccgccatcggcaagacggagaagaccggcaagcgctccaccagcgccgccgtcctggaggccctccgcgaggcccaccccatcgtggagaagatcctgcagtaccgggagctcaccaagctgaagagcacctacattgaccccttgccggacctcatccaccccaggacgggccgcctccacacccgcttcaaccagacggccacggccacgggcaggctaagtagctccgatcccaacctccagaacatccccgtccgcaccccgcttgggcagaggatccgccgggccttcatcgccgaggaggggtggctattggtggccctggactatagccagatagagctcagggtgctggcccacctctccggcgacgagaacctgatccgggtcttccaggaggggcgggacatccacacggagaccgccagctggatgttcggcgtcccccgggaggccgtggaccccctgatgcgccgggcggccaagaccatcaacttcggggtcctctacggcatgtcggcccaccgcctctcccaggagctagccatcccttacgaggaggcccaggccttcattgagcgctactttcagagcttccccaaggtgcgggcctggattgagaagaccctggaggagggcaggaggcgggggtacgtggagaccctcttcggccgccgccgctacatgccagacctagaggcccgggtgaagagcgtgcgggaggcggccgagcgcatggccttcaacatgcccgtccagggcaccgccgccgacctcatgaagctggctatggtgaagctcttccccaggctggaggaaatgggggccaggatgctccttcaggtccacgacgagctggtcctcgaggccccaaaagagagggcggaggccgtggcccggctggccaaggaggtcatggagggggtgtatcccctggccgtgcccctggaggtggaggtggggataggggaggactggctctccgccaaggagtgataccaccccatgctggcccaagccagcatgggggccccggcaaaaggtttctggggaagttaccaggcatggtgggccgaaggaaacaggaaacaagggtatgagggttttttgccctaaagaaaggccagggggtcctcccgaaggaaggcttccagggggataccccctgggcccaggagtagcccctttcctccaaaggcctgggtgaaggcttttagccctttggtcctttgggaaggggcgcttttgacctccaaagccagaaggcgccttcccttcttcaagacgaagtcaacctcctggtccctttcccgccagtagtacacctcaaagcccccgtgggggccgtgggccagaaggtgggcgcccacggcggtttccacgagccgccccatgagggcggcgtccgcccacacctcctttggggaaagccccaagaccgccgtgatgagccccgtattaagggccaggagcttggggctcgaggcgcggcgccggaagggctcggcggcgtacttctgcag

SEQ ID NO: 3239 - DNA, 3026 bp, Artificial Sequence
  Description of Artificial Sequence: Synthetic DNA sequence of Thermus aquaticus DNA Polymerase V730T
atgagggggatgctgcccctctttgagcccaagggccgggtcctcctggtggacggccaccacctggcctaccgcaccttccacgccctgaagggcctcaccaccagccggggggagccggtgcaggcggtctacggcttcgccaagagcctcctcaaggccctcaaggaggacggggacgcggtgatcgtggtctttgacgccaaggccccctccttccgccacgaggcctacggggggtacaaggcgggccgggcccccacgccggaggactttccccggcaactcgccctcatcaaggagctggtggacctcctggggctggcgcgcctcgaggtcccgggctacgaggcggacgacgtcctggccagcctggccaagaaggcggaaaaggagggctacgaggtccgcatcctcaccgccgacaaagacctttaccagctcctttccgaccgcatccacgccctccaccccgaggggtacctcatcaccccggcctggctttgggaaaagtacggcctgaggcccgaccagtgggccgactaccgggccctgaccggggacgagtccgacaaccttcccggggtcaagggcatcggggagaagacggcgaggaagcttctggaggagtgggggagcctggaagccctcctcaagaacctggaccggctgaagcccgccatccgggagaagatcctggcccacatggacgatctgaagctctcctgggacctggccaaggtgcgcaccgacctgcccctggaggtggacttcgccaaaaggcgggagcccgaccgggagaggcttagggcctttctggagaggcttgagtttggcagcctcctccacgagttcggccttctggaaagccccaaggccctggaggaggccccctggcccccgccggaaggggccttcgtgggctttgtgctttcccgcaaggagcccatgtgggccgatcttctggccctggccgccgccagggggggccgggtccaccgggcccccgagccttataaagccctcagggacctgaaggaggcgcgggggcttctcgccaaagacctgagcgttctggccctgagggaaggccttggcctcccgcccggcgacgaccccatgctcctcgcctacctcctggacccttccaacaccacccccgagggggtggcccggcgctacggcggggagtggacggaggaggcgggggagcgggccgccctttccgagaggctcttcgccaacctgtgggggaggcttgagggggaggagaggctcctttggctttaccgggaggtggagaggcccctttccgctgtcctggcccacatggaggccacgggggtgcgcctggacgtggcctatctcagggccttgtccctggaggtggccgaggagatcgcccgcctcgaggccgaggtcttccgcctggccggccaccccttcaacctcaactcccgggaccagctggaaagggtcctctttgacgagctagggcttcccgccatcggcaagacggagaagaccggcaagcgctccaccagcgccgccgtcctggaggccctccgcgaggcccaccccatcgtggagaagatcctgcagtaccgggagctcaccaagctgaagagcacctacattgaccccttgccggacctcatccaccccaggacgggccgcctccacacccgcttcaaccagacggccacggccacgggcaggctaagtagctccgatcccaacctccagaacatccccgtccgcaccccgcttgggcagaggatccgccgggccttcatcgccgaggaggggtggctattggtggccctggactatagccagatagagctcagggtgctggcccacctctccggcgacgagaacctgatccgggtcttccaggaggggcgggacatccacacggagaccgccagctggatgttcggcgtcccccgggaggccgtggaccccctgatgcgccgggcggccaagaccatcaacttcggggtcctctacggcatgtcggcccaccgcctctcccaggagctagccatcccttacgaggaggcccaggccttcattgagcgctactttcagagcttccccaaggtgcgggcctggattgagaagaccctggaggagggcaggaggcgggggtacgtggagaccctcttcggccgccgccgctacactccagacctagaggcccgggtgaagagcgtgcgggaggcggccgagcgcatggccttcaacatgcccgtccagggcaccgccgccgacctcatgaagctggctatggtgaagctcttccccaggctggaggaaatgggggccaggatgctccttcaggtccacgacgagctggtcctcgaggccccaaaagagagggcggaggccgtggcccggctggccaaggaggtcatggagggggtgtatcccctggccgtgcccctggaggtggaggtggggataggggaggactggctctccgccaaggagtgataccaccccatgctggcccaagccagcatgggggccccggcaaaaggtttctggggaagttaccaggcatggtgggccgaaggaaacaggaaacaagggtatgagggttttttgccctaaagaaaggccagggggtcctcccgaaggaaggcttccagggggataccccctgggcccaggagtagcccctttcctccaaaggcctgggtgaaggcttttagccctttggtcctttgggaaggggcgcttttgacctccaaagccagaaggcgccttcccttcttcaagacgaagtcaacctcctggtccctttcccgccagtagtacacctcaaagcccccgtgggggccgtgggccagaaggtgggcgcccacggcggtttccacgagccgccccatgagggcggcgtccgcccacacctcctttggggaaagccccaagaccgccgtgatgagccccgtattaagggccaggagcttggggctcgaggcgcggcgccggaagggctcggcggcgtacttctgcag

SEQ ID NO: 3240 - DNA, 3026 bp, Artificial Sequence
  Description of Artificial Sequence: Synthetic DNA sequence of Thermus aquaticus DNA Polymerase V730N
atgagggggatgctgcccctctttgagcccaagggccgggtcctcctggtggacggccaccacctggcctaccgcaccttccacgccctgaagggcctcaccaccagccggggggagccggtgcaggcggtctacggcttcgccaagagcctcctcaaggccctcaaggaggacggggacgcggtgatcgtggtctttgacgccaaggccccctccttccgccacgaggcctacggggggtacaaggcgggccgggcccccacgccggaggactttccccggcaactcgccctcatcaaggagctggtggacctcctggggctggcgcgcctcgaggtcccgggctacgaggcggacgacgtcctggccagcctggccaagaaggcggaaaaggagggctacgaggtccgcatcctcaccgccgacaaagacctttaccagctcctttccgaccgcatccacgccctccaccccgaggggtacctcatcaccccggcctggctttgggaaaagtacggcctgaggcccgaccagtgggccgactaccgggccctgaccggggacgagtccgacaaccttcccggggtcaagggcatcggggagaagacggcgaggaagcttctggaggagtgggggagcctggaagccctcctcaagaacctggaccggctgaagcccgccatccgggagaagatcctggcccacatggacgatctgaagctctcctgggacctggccaaggtgcgcaccgacctgcccctggaggtggacttcgccaaaaggcgggagcccgaccgggagaggcttagggcctttctggagaggcttgagtttggcagcctcctccacgagttcggccttctggaaagccccaaggccctggaggaggccccctggcccccgccggaaggggccttcgtgggctttgtgctttcccgcaaggagcccatgtgggccgatcttctggccctggccgccgccagggggggccgggtccaccgggcccccgagccttataaagccctcagggacctgaaggaggcgcgggggcttctcgccaaagacctgagcgttctggccctgagggaaggccttggcctcccgcccggcgacgaccccatgctcctcgcctacctcctggacccttccaacaccacccccgagggggtggcccggcgctacggcggggagtggacggaggaggcgggggagcgggccgccctttccgagaggctcttcgccaacctgtgggggaggcttgagggggaggagaggctcctttggctttaccgggaggtggagaggcccctttccgctgtcctggcccacatggaggccacgggggtgcgcctggacgtggcctatctcagggccttgtccctggaggtggccgaggagatcgcccgcctcgaggccgaggtcttccgcctggccggccaccccttcaacctcaactcccgggaccagctggaaagggtcctctttgacgagctagggcttcccgccatcggcaagacggagaagaccggcaagcgctccaccagcgccgccgtcctggaggccctccgcgaggcccaccccatcgtggagaagatcctgcagtaccgggagctcaccaagctgaagagcacctacattgaccccttgccggacctcatccaccccaggacgggccgcctccacacccgcttcaaccagacggccacggccacgggcaggctaagtagctccgatcccaacctccagaacatccccgtccgcaccccgcttgggcagaggatccgccgggccttcatcgccgaggaggggtggctattggtggccctggactatagccagatagagctcagggtgctggcccacctctccggcgacgagaacctgatccgggtcttccaggaggggcgggacatccacacggagaccgccagctggatgttcggcgtcccccgggaggccgtggaccccctgatgcgccgggcggccaagaccatcaacttcggggtcctctacggcatgtcggcccaccgcctctcccaggagctagccatcccttacgaggaggcccaggccttcattgagcgctactttcagagcttccccaaggtgcgggcctggattgagaagaccctggaggagggcaggaggcgggggtacgtggagaccctcttcggccgccgccgctacaatccagacctagaggcccgggtgaagagcgtgcgggaggcggccgagcgcatggccttcaacatgcccgtccagggcaccgccgccgacctcatgaagctggctatggtgaagctcttccccaggctggaggaaatgggggccaggatgctccttcaggtccacgacgagctggtcctcgaggccccaaaagagagggcggaggccgtggcccggctggccaaggaggtcatggagggggtgtatcccctggccgtgcccctggaggtggaggtggggataggggaggactggctctccgccaaggagtgataccaccccatgctggcccaagccagcatgggggccccggcaaaaggtttctggggaagttaccaggcatggtgggccgaaggaaacaggaaacaagggtatgagggttttttgccctaaagaaaggccagggggtcctcccgaaggaaggcttccagggggataccccctgggcccaggagtagcccctttcctccaaaggcctgggtgaaggcttttagccctttggtcctttgggaaggggcgcttttgacctccaaagccagaaggcgccttcccttcttcaagacgaagtcaacctcctggtccctttcccgccagtagtacacctcaaagcccccgtgggggccgtgggccagaaggtgggcgcccacggcggtttccacgagccgccccatgagggcggcgtccgcccacacctcctttggggaaagccccaagaccgccgtgatgagccccgtattaagggccaggagcttggggctcgaggcgcggcgccggaagggctcggcggcgtacttctgcag

SEQ ID NO: 3241 - DNA, 3026 bp, Artificial Sequence
  Description of Artificial Sequence: Synthetic DNA sequence of Thermus aquaticus DNA Polymerase P731A
atgagggggatgctgcccctctttgagcccaagggccgggtcctcctggtggacggccaccacctggcctaccgcaccttccacgccctgaagggcctcaccaccagccggggggagccggtgcaggcggtctacggcttcgccaagagcctcctcaaggccctcaaggaggacggggacgcggtgatcgtggtctttgacgccaaggccccctccttccgccacgaggcctacggggggtacaaggcgggccgggcccccacgccggaggactttccccggcaactcgccctcatcaaggagctggtggacctcctggggctggcgcgcctcgaggtcccgggctacgaggcggacgacgtcctggccagcctggccaagaaggcggaaaaggagggctacgaggtccgcatcctcaccgccgacaaagacctttaccagctcctttccgaccgcatccacgccctccaccccgaggggtacctcatcaccccggcctggctttgggaaaagtacggcctgaggcccgaccagtgggccgactaccgggccctgaccggggacgagtccgacaaccttcccggggtcaagggcatcggggagaagacggcgaggaagcttctggaggagtgggggagcctggaagccctcctcaagaacctggaccggctgaagcccgccatccgggagaagatcctggcccacatggacgatctgaagctctcctgggacctggccaaggtgcgcaccgacctgcccctggaggtggacttcgccaaaaggcgggagcccgaccgggagaggcttagggcctttctggagaggcttgagtttggcagcctcctccacgagttcggccttctggaaagccccaaggccctggaggaggccccctggcccccgccggaaggggccttcgtgggctttgtgctttcccgcaaggagcccatgtgggccgatcttctggccctggccgccgccagggggggccgggtccaccgggcccccgagccttataaagccctcagggacctgaaggaggcgcgggggcttctcgccaaagacctgagcgttctggccctgagggaaggccttggcctcccgcccggcgacgaccccatgctcctcgcctacctcctggacccttccaacaccacccccgagggggtggcccggcgctacggcggggagtggacggaggaggcgggggagcgggccgccctttccgagaggctcttcgccaacctgtgggggaggcttgagggggaggagaggctcctttggctttaccgggaggtggagaggcccctttccgctgtcctggcccacatggaggccacgggggtgcgcctggacgtggcctatctcagggccttgtccctggaggtggccgaggagatcgcccgcctcgaggccgaggtcttccgcctggccggccaccccttcaacctcaactcccgggaccagctggaaagggtcctctttgacgagctagggcttcccgccatcggcaagacggagaagaccggcaagcgctccaccagcgccgccgtcctggaggccctccgcgaggcccaccccatcgtggagaagatcctgcagtaccgggagctcaccaagctgaagagcacctacattgaccccttgccggacctcatccaccccaggacgggccgcctccacacccgcttcaaccagacggccacggccacgggcaggctaagtagctccgatcccaacctccagaacatccccgtccgcaccccgcttgggcagaggatccgccgggccttcatcgccgaggaggggtggctattggtggccctggactatagccagatagagctcagggtgctggcccacctctccggcgacgagaacctgatccgggtcttccaggaggggcgggacatccacacggagaccgccagctggatgttcggcgtcccccgggaggccgtggaccccctgatgcgccgggcggccaagaccatcaacttcggggtcctctacggcatgtcggcccaccgcctctcccaggagctagccatcccttacgaggaggcccaggccttcattgagcgctactttcagagcttccccaaggtgcgggcctggattgagaagaccctggaggagggcaggaggcgggggtacgtggagaccctcttcggccgccgccgctacgtggctgacctagaggcccgggtgaagagcgtgcgggaggcggccgagcgcatggccttcaacatgcccgtccagggcaccgccgccgacctcatgaagctggctatggtgaagctcttccccaggctggaggaaatgggggccaggatgctccttcaggtccacgacgagctggtcctcgaggccccaaaagagagggcggaggccgtggcccggctggccaaggaggtcatggagggggtgtatcccctggccgtgcccctggaggtggaggtggggataggggaggactggctctccgccaaggagtgataccaccccatgctggcccaagccagcatgggggccccggcaaaaggtttctggggaagttaccaggcatggtgggccgaaggaaacaggaaacaagggtatgagggttttttgccctaaagaaaggccagggggtcctcccgaaggaaggcttccagggggataccccctgggcccaggagtagcccctttcctccaaaggcctgggtgaaggcttttagccctttggtcctttgggaaggggcgcttttgacctccaaagccagaaggcgccttcccttcttcaagacgaagtcaacctcctggtccctttcccgccagtagtacacctcaaagcccccgtgggggccgtgggccagaaggtgggcgcccacggcggtttccacgagccgccccatgagggcggcgtccgcccacacctcctttggggaaagccccaagaccgccgtgatgagccccgtattaagggccaggagcttggggctcgaggcgcggcgccggaagggctcggcggcgtacttctgcag

SEQ ID NO: 3242 - DNA, 3026 bp, Artificial Sequence
  Description of Artificial Sequence: Synthetic DNA sequence of Thermus aquaticus DNA Polymerase P731R
atgagggggatgctgcccctctttgagcccaagggccgggtcctcctggtggacggccaccacctggcctaccgcaccttccacgccctgaagggcctcaccaccagccggggggagccggtgcaggcggtctacggcttcgccaagagcctcctcaaggccctcaaggaggacggggacgcggtgatcgtggtctttgacgccaaggccccctccttccgccacgaggcctacggggggtacaaggcgggccgggcccccacgccggaggactttccccggcaactcgccctcatcaaggagctggtggacctcctggggctggcgcgcctcgaggtcccgggctacgaggcggacgacgtcctggccagcctggccaagaaggcggaaaaggagggctacgaggtccgcatcctcaccgccgacaaagacctttaccagctcctttccgaccgcatccacgccctccaccccgaggggtacctcatcaccccggcctggctttgggaaaagtacggcctgaggcccgaccagtgggccgactaccgggccctgaccggggacgagtccgacaaccttcccggggtcaagggcatcggggagaagacggcgaggaagcttctggaggagtgggggagcctggaagccctcctcaagaacctggaccggctgaagcccgccatccgggagaagatcctggcccacatggacgatctgaagctctcctgggacctggccaaggtgcgcaccgacctgcccctggaggtggacttcgccaaaaggcgggagcccgaccgggagaggcttagggcctttctggagaggcttgagtttggcagcctcctccacgagttcggccttctggaaagccccaaggccctggaggaggccccctggcccccgccggaaggggccttcgtgggctttgtgctttcccgcaaggagcccatgtgggccgatcttctggccctggccgccgccagggggggccgggtccaccgggcccccgagccttataaagccctcagggacctgaaggaggcgcgggggcttctcgccaaagacctgagcgttctggccctgagggaaggccttggcctcccgcccggcgacgaccccatgctcctcgcctacctcctggacccttccaacaccacccccgagggggtggcccggcgctacggcggggagtggacggaggaggcgggggagcgggccgccctttccgagaggctcttcgccaacctgtgggggaggcttgagggggaggagaggctcctttggctttaccgggaggtggagaggcccctttccgctgtcctggcccacatggaggccacgggggtgcgcctggacgtggcctatctcagggccttgtccctggaggtggccgaggagatcgcccgcctcgaggccgaggtcttccgcctggccggccaccccttcaacctcaactcccgggaccagctggaaagggtcctctttgacgagctagggcttcccgccatcggcaagacggagaagaccggcaagcgctccaccagcgccgccgtcctggaggccctccgcgaggcccaccccatcgtggagaagatcctgcagtaccgggagctcaccaagctgaagagcacctacattgaccccttgccggacctcatccaccccaggacgggccgcctccacacccgcttcaaccagacggccacggccacgggcaggctaagtagctccgatcccaacctccagaacatccccgtccgcaccccgcttgggcagaggatccgccgggccttcatcgccgaggaggggtggctattggtggccctggactatagccagatagagctcagggtgctggcccacctctccggcgacgagaacctgatccgggtcttccaggaggggcgggacatccacacggagaccgccagctggatgttcggcgtcccccgggaggccgtggaccccctgatgcgccgggcggccaagaccatcaacttcggggtcctctacggcatgtcggcccaccgcctctcccaggagctagccatcccttacgaggaggcccaggccttcattgagcgctactttcagagcttccccaaggtgcgggcctggattgagaagaccctggaggagggcaggaggcgggggtacgtggagaccctcttcggccgccgccgctacgtgcgagacctagaggcccgggtgaagagcgtgcgggaggcggccgagcgcatggccttcaacatgcccgtccagggcaccgccgccgacctcatgaagctggctatggtgaagctcttccccaggctggaggaaatgggggccaggatgctccttcaggtccacgacgagctggtcctcgaggccccaaaagagagggcggaggccgtggcccggctggccaaggaggtcatggagggggtgtatcccctggccgtgcccctggaggtggaggtggggataggggaggactggctctccgccaaggagtgataccaccccatgctggcccaagccagcatgggggccccggcaaaaggtttctggggaagttaccaggcatggtgggccgaaggaaacaggaaacaagggtatgagggttttttgccctaaagaaaggccagggggtcctcccgaaggaaggcttccagggggataccccctgggcccaggagtagcccctttcctccaaaggcctgggtgaaggcttttagccctttggtcctttgggaaggggcgcttttgacctccaaagccagaaggcgccttcccttcttcaagacgaagtcaacctcctggtccctttcccgccagtagtacacctcaaagcccccgtgggggccgtgggccagaaggtgggcgcccacggcggtttccacgagccgccccatgagggcggcgtccgcccacacctcctttggggaaagccccaagaccgccgtgatgagccccgtattaagggccaggagcttggggctcgaggcgcggcgccggaagggctcggcggcgtacttctgcag

SEQ ID NO: 3243 - DNA, 3026 bp, Artificial Sequence
  Description of Artificial Sequence: Synthetic DNA sequence of Thermus aquaticus DNA Polymerase P731C
atgagggggatgctgcccctctttgagcccaagggccgggtcctcctggtggacggccaccacctggcctaccgcaccttccacgccctgaagggcctcaccaccagccggggggagccggtgcaggcggtctacggcttcgccaagagcctcctcaaggccctcaaggaggacggggacgcggtgatcgtggtctttgacgccaaggccccctccttccgccacgaggcctacggggggtacaaggcgggccgggcccccacgccggaggactttccccggcaactcgccctcatcaaggagctggtggacctcctggggctggcgcgcctcgaggtcccgggctacgaggcggacgacgtcctggccagcctggccaagaaggcggaaaaggagggctacgaggtccgcatcctcaccgccgacaaagacctttaccagctcctttccgaccgcatccacgccctccaccccgaggggtacctcatcaccccggcctggctttgggaaaagtacggcctgaggcccgaccagtgggccgactaccgggccctgaccggggacgagtccgacaaccttcccggggtcaagggcatcggggagaagacggcgaggaagcttctggaggagtgggggagcctggaagccctcctcaagaacctggaccggctgaagcccgccatccgggagaagatcctggcccacatggacgatctgaagctctcctgggacctggccaaggtgcgcaccgacctgcccctggaggtggacttcgccaaaaggcgggagcccgaccgggagaggcttagggcctttctggagaggcttgagtttggcagcctcctccacgagttcggccttctggaaagccccaaggccctggaggaggccccctggcccccgccggaaggggccttcgtgggctttgtgctttcccgcaaggagcccatgtgggccgatcttctggccctggccgccgccagggggggccgggtccaccgggcccccgagccttataaagccctcagggacctgaaggaggcgcgggggcttctcgccaaagacctgagcgttctggccctgagggaaggccttggcctcccgcccggcgacgaccccatgctcctcgcctacctcctggacccttccaacaccacccccgagggggtggcccggcgctacggcggggagtggacggaggaggcgggggagcgggccgccctttccgagaggctcttcgccaacctgtgggggaggcttgagggggaggagaggctcctttggctttaccgggaggtggagaggcccctttccgctgtcctggcccacatggaggccacgggggtgcgcctggacgtggcctatctcagggccttgtccctggaggtggccgaggagatcgcccgcctcgaggccgaggtcttccgcctggccggccaccccttcaacctcaactcccgggaccagctggaaagggtcctctttgacgagctagggcttcccgccatcggcaagacggagaagaccggcaagcgctccaccagcgccgccgtcctggaggccctccgcgaggcccaccccatcgtggagaagatcctgcagtaccgggagctcaccaagctgaagagcacctacattgaccccttgccggacctcatccaccccaggacgggccgcctccacacccgcttcaaccagacggccacggccacgggcaggctaagtagctccgatcccaacctccagaacatccccgtccgcaccccgcttgggcagaggatccgccgggccttcatcgccgaggaggggtggctattggtggccctggactatagccagatagagctcagggtgctggcccacctctccggcgacgagaacctgatccgggtcttccaggaggggcgggacatccacacggagaccgccagctggatgttcggcgtcccccgggaggccgtggaccccctgatgcgccgggcggccaagaccatcaacttcggggtcctctacggcatgtcggcccaccgcctctcccaggagctagccatcccttacgaggaggcccaggccttcattgagcgctactttcagagcttccccaaggtgcgggcctggattgagaagaccctggaggagggcaggaggcgggggtacgtggagaccctcttcggccgccgccgctacgtgtgtgacctagaggcccgggtgaagagcgtgcgggaggcggccgagcgcatggccttcaacatgcccgtccagggcaccgccgccgacctcatgaagctggctatggtgaagctcttccccaggctggaggaaatgggggccaggatgctccttcaggtccacgacgagctggtcctcgaggccccaaaagagagggcggaggccgtggcccggctggccaaggaggtcatggagggggtgtatcccctggccgtgcccctggaggtggaggtggggataggggaggactggctctccgccaaggagtgataccaccccatgctggcccaagccagcatgggggccccggcaaaaggtttctggggaagttaccaggcatggtgggccgaaggaaacaggaaacaagggtatgagggttttttgccctaaagaaaggccagggggtcctcccgaaggaaggcttccagggggataccccctgggcccaggagtagcccctttcctccaaaggcctgggtgaaggcttttagccctttggtcctttgggaaggggcgcttttgacctccaaagccagaaggcgccttcccttcttcaagacgaagtcaacctcctggtccctttcccgccagtagtacacctcaaagcccccgtgggggccgtgggccagaaggtgggcgcccacggcggtttccacgagccgccccatgagggcggcgtccgcccacacctcctttggggaaagccccaagaccgccgtgatgagccccgtattaagggccaggagcttggggctcgaggcgcggcgccggaagggctcggcggcgtacttctgcag

SEQ ID NO: 3244 - DNA, 3026 bp, Artificial Sequence
  Description of Artificial Sequence: Synthetic DNA sequence of Thermus aquaticus DNA Polymerase P731G
atgagggggatgctgcccctctttgagcccaagggccgggtcctcctggtggacggccaccacctggcctaccgcaccttccacgccctgaagggcctcaccaccagccggggggagccggtgcaggcggtctacggcttcgccaagagcctcctcaaggccctcaaggaggacggggacgcggtgatcgtggtctttgacgccaaggccccctccttccgccacgaggcctacggggggtacaaggcgggccgggcccccacgccggaggactttccccggcaactcgccctcatcaaggagctggtggacctcctggggctggcgcgcctcgaggtcccgggctacgaggcggacgacgtcctggccagcctggccaagaaggcggaaaaggagggctacgaggtccgcatcctcaccgccgacaaagacctttaccagctcctttccgaccgcatccacgccctccaccccgaggggtacctcatcaccccggcctggctttgggaaaagtacggcctgaggcccgaccagtgggccgactaccgggccctgaccggggacgagtccgacaaccttcccggggtcaagggcatcggggagaagacggcgaggaagcttctggaggagtgggggagcctggaagccctcctcaagaacctggaccggctgaagcccgccatccgggagaagatcctggcccacatggacgatctgaagctctcctgggacctggccaaggtgcgcaccgacctgcccctggaggtggacttcgccaaaaggcgggagcccgaccgggagaggcttagggcctttctggagaggcttgagtttggcagcctcctccacgagttcggccttctggaaagccccaaggccctggaggaggccccctggcccccgccggaaggggccttcgtgggctttgtgctttcccgcaaggagcccatgtgggccgatcttctggccctggccgccgccagggggggccgggtccaccgggcccccgagccttataaagccctcagggacctgaaggaggcgcgggggcttctcgccaaagacctgagcgttctggccctgagggaaggccttggcctcccgcccggcgacgaccccatgctcctcgcctacctcctggacccttccaacaccacccccgagggggtggcccggcgctacggcggggagtggacggaggaggcgggggagcgggccgccctttccgagaggctcttcgccaacctgtgggggaggcttgagggggaggagaggctcctttggctttaccgggaggtggagaggcccctttccgctgtcctggcccacatggaggccacgggggtgcgcctggacgtggcctatctcagggccttgtccctggaggtggccgaggagatcgcccgcctcgaggccgaggtcttccgcctggccggccaccccttcaacctcaactcccgggaccagctggaaagggtcctctttgacgagctagggcttcccgccatcggcaagacggagaagaccggcaagcgctccaccagcgccgccgtcctggaggccctccgcgaggcccaccccatcgtggagaagatcctgcagtaccgggagctcaccaagctgaagagcacctacattgaccccttgccggacctcatccaccccaggacgggccgcctccacacccgcttcaaccagacggccacggccacgggcaggctaagtagctccgatcccaacctccagaacatccccgtccgcaccccgcttgggcagaggatccgccgggccttcatcgccgaggaggggtggctattggtggccctggactatagccagatagagctcagggtgctggcccacctctccggcgacgagaacctgatccgggtcttccaggaggggcgggacatccacacggagaccgccagctggatgttcggcgtcccccgggaggccgtggaccccctgatgcgccgggcggccaagaccatcaacttcggggtcctctacggcatgtcggcccaccgcctctcccaggagctagccatcccttacgaggaggcccaggccttcattgagcgctactttcagagcttccccaaggtgcgggcctggattgagaagaccctggaggagggcaggaggcgggggtacgtggagaccctcttcggccgccgccgctacgtgggtgacctagaggcccgggtgaagagcgtgcgggaggcggccgagcgcatggccttcaacatgcccgtccagggcaccgccgccgacctcatgaagctggctatggtgaagctcttccccaggctggaggaaatgggggccaggatgctccttcaggtccacgacgagctggtcctcgaggccccaaaagagagggcggaggccgtggcccggctggccaaggaggtcatggagggggtgtatcccctggccgtgcccctggaggtggaggtggggataggggaggactggctctccgccaaggagtgataccaccccatgctggcccaagccagcatgggggccccggcaaaaggtttctggggaagttaccaggcatggtgggccgaaggaaacaggaaacaagggtatgagggttttttgccctaaagaaaggccagggggtcctcccgaaggaaggcttccagggggataccccctgggcccaggagtagcccctttcctccaaaggcctgggtgaaggcttttagccctttggtcctttgggaaggggcgcttttgacctccaaagccagaaggcgccttcccttcttcaagacgaagtcaacctcctggtccctttcccgccagtagtacacctcaaagcccccgtgggggccgtgggccagaaggtgggcgcccacggcggtttccacgagccgccccatgagggcggcgtccgcccacacctcctttggggaaagccccaagaccgccgtgatgagccccgtattaagggccaggagcttggggctcgaggcgcggcgccggaagggctcggcggcgtacttctgcag

SEQ ID NO: 3245 - DNA, 3026 bp, Artificial Sequence
  Description of Artificial Sequence: Synthetic DNA sequence of Thermus aquaticus DNA Polymerase P731Q
atgagggggatgctgcccctctttgagcccaagggccgggtcctcctggtggacggccaccacctggcctaccgcaccttccacgccctgaagggcctcaccaccagccggggggagccggtgcaggcggtctacggcttcgccaagagcctcctcaaggccctcaaggaggacggggacgcggtgatcgtggtctttgacgccaaggccccctccttccgccacgaggcctacggggggtacaaggcgggccgggcccccacgccggaggactttccccggcaactcgccctcatcaaggagctggtggacctcctggggctggcgcgcctcgaggtcccgggctacgaggcggacgacgtcctggccagcctggccaagaaggcggaaaaggagggctacgaggtccgcatcctcaccgccgacaaagacctttaccagctcctttccgaccgcatccacgccctccaccccgaggggtacctcatcaccccggcctggctttgggaaaagtacggcctgaggcccgaccagtgggccgactaccgggccctgaccggggacgagtccgacaaccttcccggggtcaagggcatcggggagaagacggcgaggaagcttctggaggagtgggggagcctggaagccctcctcaagaacctggaccggctgaagcccgccatccgggagaagatcctggcccacatggacgatctgaagctctcctgggacctggccaaggtgcgcaccgacctgcccctggaggtggacttcgccaaaaggcgggagcccgaccgggagaggcttagggcctttctggagaggcttgagtttggcagcctcctccacgagttcggccttctggaaagccccaaggccctggaggaggccccctggcccccgccggaaggggccttcgtgggctttgtgctttcccgcaaggagcccatgtgggccgatcttctggccctggccgccgccagggggggccgggtccaccgggcccccgagccttataaagccctcagggacctgaaggaggcgcgggggcttctcgccaaagacctgagcgttctggccctgagggaaggccttggcctcccgcccggcgacgaccccatgctcctcgcctacctcctggacccttccaacaccacccccgagggggtggcccggcgctacggcggggagtggacggaggaggcgggggagcgggccgccctttccgagaggctcttcgccaacctgtgggggaggcttgagggggaggagaggctcctttggctttaccgggaggtggagaggcccctttccgctgtcctggcccacatggaggccacgggggtgcgcctggacgtggcctatctcagggccttgtccctggaggtggccgaggagatcgcccgcctcgaggccgaggtcttccgcctggccggccaccccttcaacctcaactcccgggaccagctggaaagggtcctctttgacgagctagggcttcccgccatcggcaagacggagaagaccggcaagcgctccaccagcgccgccgtcctggaggccctccgcgaggcccaccccatcgtggagaagatcctgcagtaccgggagctcaccaagctgaagagcacctacattgaccccttgccggacctcatccaccccaggacgggccgcctccacacccgcttcaaccagacggccacggccacgggcaggctaagtagctccgatcccaacctccagaacatccccgtccgcaccccgcttgggcagaggatccgccgggccttcatcgccgaggaggggtggctattggtggccctggactatagccagatagagctcagggtgctggcccacctctccggcgacgagaacctgatccgggtcttccaggaggggcgggacatccacacggagaccgccagctggatgttcggcgtcccccgggaggccgtggaccccctgatgcgccgggcggccaagaccatcaacttcggggtcctctacggcatgtcggcccaccgcctctcccaggagctagccatcccttacgaggaggcccaggccttcattgagcgctactttcagagcttccccaaggtgcgggcctggattgagaagaccctggaggagggcaggaggcgggggtacgtggagaccctcttcggccgccgccgctacgtgcaagacctagaggcccgggtgaagagcgtgcgggaggcggccgagcgcatggccttcaacatgcccgtccagggcaccgccgccgacctcatgaagctggctatggtgaagctcttccccaggctggaggaaatgggggccaggatgctccttcaggtccacgacgagctggtcctcgaggccccaaaagagagggcggaggccgtggcccggctggccaaggaggtcatggagggggtgtatcccctggccgtgcccctggaggtggaggtggggataggggaggactggctctccgccaaggagtgataccaccccatgctggcccaagccagcatgggggccccggcaaaaggtttctggggaagttaccaggcatggtgggccgaaggaaacaggaaacaagggtatgagggttttttgccctaaagaaaggccagggggtcctcccgaaggaaggcttccagggggataccccctgggcccaggagtagcccctttcctccaaaggcctgggtgaaggcttttagccctttggtcctttgggaaggggcgcttttgacctccaaagccagaaggcgccttcccttcttcaagacgaagtcaacctcctggtccctttcccgccagtagtacacctcaaagcccccgtgggggccgtgggccagaaggtgggcgcccacggcggtttccacgagccgccccatgagggcggcgtccgcccacacctcctttggggaaagccccaagaccgccgtgatgagccccgtattaagggccaggagcttggggctcgaggcgcggcgccggaagggctcggcggcgtacttctgcag

SEQ ID NO: 3246 - DNA, 3026 bp, Artificial Sequence
  Description of Artificial Sequence: Synthetic DNA sequence of Thermus aquaticus DNA Polymerase P731H
atgagggggatgctgcccctctttgagcccaagggccgggtcctcctggtggacggccaccacctggcctaccgcaccttccacgccctgaagggcctcaccaccagccggggggagccggtgcaggcggtctacggcttcgccaagagcctcctcaaggccctcaaggaggacggggacgcggtgatcgtggtctttgacgccaaggccccctccttccgccacgaggcctacggggggtacaaggcgggccgggcccccacgccggaggactttccccggcaactcgccctcatcaaggagctggtggacctcctggggctggcgcgcctcgaggtcccgggctacgaggcggacgacgtcctggccagcctggccaagaaggcggaaaaggagggctacgaggtccgcatcctcaccgccgacaaagacctttaccagctcctttccgaccgcatccacgccctccaccccgaggggtacctcatcaccccggcctggctttgggaaaagtacggcctgaggcccgaccagtgggccgactaccgggccctgaccggggacgagtccgacaaccttcccggggtcaagggcatcggggagaagacggcgaggaagcttctggaggagtgggggagcctggaagccctcctcaagaacctggaccggctgaagcccgccatccgggagaagatcctggcccacatggacgatctgaagctctcctgggacctggccaaggtgcgcaccgacctgcccctggaggtggacttcgccaaaaggcgggagcccgaccgggagaggcttagggcctttctggagaggcttgagtttggcagcctcctccacgagttcggccttctggaaagccccaaggccctggaggaggccccctggcccccgccggaaggggccttcgtgggctttgtgctttcccgcaaggagcccatgtgggccgatcttctggccctggccgccgccagggggggccgggtccaccgggcccccgagccttataaagccctcagggacctgaaggaggcgcgggggcttctcgccaaagacctgagcgttctggccctgagggaaggccttggcctcccgcccggcgacgaccccatgctcctcgcctacctcctggacccttccaacaccacccccgagggggtggcccggcgctacggcggggagtggacggaggaggcgggggagcgggccgccctttccgagaggctcttcgccaacctgtgggggaggcttgagggggaggagaggctcctttggctttaccgggaggtggagaggcccctttccgctgtcctggcccacatggaggccacgggggtgcgcctggacgtggcctatctcagggccttgtccctggaggtggccgaggagatcgcccgcctcgaggccgaggtcttccgcctggccggccaccccttcaacctcaactcccgggaccagctggaaagggtcctctttgacgagctagggcttcccgccatcggcaagacggagaagaccggcaagcgctccaccagcgccgccgtcctggaggccctccgcgaggcccaccccatcgtggagaagatcctgcagtaccgggagctcaccaagctgaagagcacctacattgaccccttgccggacctcatccaccccaggacgggccgcctccacacccgcttcaaccagacggccacggccacgggcaggctaagtagctccgatcccaacctccagaacatccccgtccgcaccccgcttgggcagaggatccgccgggccttcatcgccgaggaggggtggctattggtggccctggactatagccagatagagctcagggtgctggcccacctctccggcgacgagaacctgatccgggtcttccaggaggggcgggacatccacacggagaccgccagctggatgttcggcgtcccccgggaggccgtggaccccctgatgcgccgggcggccaagaccatcaacttcggggtcctctacggcatgtcggcccaccgcctctcccaggagctagccatcccttacgaggaggcccaggccttcattgagcgctactttcagagcttccccaaggtgcgggcctggattgagaagaccctggaggagggcaggaggcgggggtacgtggagaccctcttcggccgccgccgctacgtgcatgacctagaggcccgggtgaagagcgtgcgggaggcggccgagcgcatggccttcaacatgcccgtccagggcaccgccgccgacctcatgaagctggctatggtgaagctcttccccaggctggaggaaatgggggccaggatgctccttcaggtccacgacgagctggtcctcgaggccccaaaagagagggcggaggccgtggcccggctggccaaggaggtcatggagggggtgtatcccctggccgtgcccctggaggtggaggtggggataggggaggactggctctccgccaaggagtgataccaccccatgctggcccaagccagcatgggggccccggcaaaaggtttctggggaagttaccaggcatggtgggccgaaggaaacaggaaacaagggtatgagggttttttgccctaaagaaaggccagggggtcctcccgaaggaaggcttccagggggataccccctgggcccaggagtagcccctttcctccaaaggcctgggtgaaggcttttagccctttggtcctttgggaaggggcgcttttgacctccaaagccagaaggcgccttcccttcttcaagacgaagtcaacctcctggtccctttcccgccagtagtacacctcaaagcccccgtgggggccgtgggccagaaggtgggcgcccacggcggtttccacgagccgccccatgagggcggcgtccgcccacacctcctttggggaaagccccaagaccgccgtgatgagccccgtattaagggccaggagcttggggctcgaggcgcggcgccggaagggctcggcggcgtacttctgcag

SEQ ID NO: 3247 - DNA, 3026 bp, Artificial Sequence
  Description of Artificial Sequence: Synthetic DNA sequence of Thermus aquaticus DNA Polymerase P731I
atgagggggatgctgcccctctttgagcccaagggccgggtcctcctggtggacggccaccacctggcctaccgcaccttccacgccctgaagggcctcaccaccagccggggggagccggtgcaggcggtctacggcttcgccaagagcctcctcaaggccctcaaggaggacggggacgcggtgatcgtggtctttgacgccaaggccccctccttccgccacgaggcctacggggggtacaaggcgggccgggcccccacgccggaggactttccccggcaactcgccctcatcaaggagctggtggacctcctggggctggcgcgcctcgaggtcccgggctacgaggcggacgacgtcctggccagcctggccaagaaggcggaaaaggagggctacgaggtccgcatcctcaccgccgacaaagacctttaccagctcctttccgaccgcatccacgccctccaccccgaggggtacctcatcaccccggcctggctttgggaaaagtacggcctgaggcccgaccagtgggccgactaccgggccctgaccggggacgagtccgacaaccttcccggggtcaagggcatcggggagaagacggcgaggaagcttctggaggagtgggggagcctggaagccctcctcaagaacctggaccggctgaagcccgccatccgggagaagatcctggcccacatggacgatctgaagctctcctgggacctggccaaggtgcgcaccgacctgcccctggaggtggacttcgccaaaaggcgggagcccgaccgggagaggcttagggcctttctggagaggcttgagtttggcagcctcctccacgagttcggccttctggaaagccccaaggccctggaggaggccccctggcccccgccggaaggggccttcgtgggctttgtgctttcccgcaaggagcccatgtgggccgatcttctggccctggccgccgccagggggggccgggtccaccgggcccccgagccttataaagccctcagggacctgaaggaggcgcgggggcttctcgccaaagacctgagcgttctggccctgagggaaggccttggcctcccgcccggcgacgaccccatgctcctcgcctacctcctggacccttccaacaccacccccgagggggtggcccggcgctacggcggggagtggacggaggaggcgggggagcgggccgccctttccgagaggctcttcgccaacctgtgggggaggcttgagggggaggagaggctcctttggctttaccgggaggtggagaggcccctttccgctgtcctggcccacatggaggccacgggggtgcgcctggacgtggcctatctcagggccttgtccctggaggtggccgaggagatcgcccgcctcgaggccgaggtcttccgcctggccggccaccccttcaacctcaactcccgggaccagctggaaagggtcctctttgacgagctagggcttcccgccatcggcaagacggagaagaccggcaagcgctccaccagcgccgccgtcctggaggccctccgcgaggcccaccccatcgtggagaagatcctgcagtaccgggagctcaccaagctgaagagcacctacattgaccccttgccggacctcatccaccccaggacgggccgcctccacacccgcttcaaccagacggccacggccacgggcaggctaagtagctccgatcccaacctccagaacatccccgtccgcaccccgcttgggcagaggatccgccgggccttcatcgccgaggaggggtggctattggtggccctggactatagccagatagagctcagggtgctggcccacctctccggcgacgagaacctgatccgggtcttccaggaggggcgggacatccacacggagaccgccagctggatgttcggcgtcccccgggaggccgtggaccccctgatgcgccgggcggccaagaccatcaacttcggggtcctctacggcatgtcggcccaccgcctctcccaggagctagccatcccttacgaggaggcccaggccttcattgagcgctactttcagagcttccccaaggtgcgggcctggattgagaagaccctggaggagggcaggaggcgggggtacgtggagaccctcttcggccgccgccgctacgtgattgacctagaggcccgggtgaagagcgtgcgggaggcggccgagcgcatggccttcaacatgcccgtccagggcaccgccgccgacctcatgaagctggctatggtgaagctcttccccaggctggaggaaatgggggccaggatgctccttcaggtccacgacgagctggtcctcgaggccccaaaagagagggcggaggccgtggcccggctggccaaggaggtcatggagggggtgtatcccctggccgtgcccctggaggtggaggtggggataggggaggactggctctccgccaaggagtgataccaccccatgctggcccaagccagcatgggggccccggcaaaaggtttctggggaagttaccaggcatggtgggccgaaggaaacaggaaacaagggtatgagggttttttgccctaaagaaaggccagggggtcctcccgaaggaaggcttccagggggataccccctgggcccaggagtagcccctttcctccaaaggcctgggtgaaggcttttagccctttggtcctttgggaaggggcgcttttgacctccaaagccagaaggcgccttcccttcttcaagacgaagtcaacctcctggtccctttcccgccagtagtacacctcaaagcccccgtgggggccgtgggccagaaggtgggcgcccacggcggtttccacgagccgccccatgagggcggcgtccgcccacacctcctttggggaaagccccaagaccgccgtgatgagccccgtattaagggccaggagcttggggctcgaggcgcggcgccggaagggctcggcggcgtacttctgcag

SEQ ID NO: 3248 - DNA, 3026 bp, Artificial Sequence
  Description of Artificial Sequence: Synthetic DNA sequence of Thermus aquaticus DNA Polymerase P731L
atgagggggatgctgcccctctttgagcccaagggccgggtcctcctggtggacggccaccacctggcctaccgcaccttccacgccctgaagggcctcaccaccagccggggggagccggtgcaggcggtctacggcttcgccaagagcctcctcaaggccctcaaggaggacggggacgcggtgatcgtggtctttgacgccaaggccccctccttccgccacgaggcctacggggggtacaaggcgggccgggcccccacgccggaggactttccccggcaactcgccctcatcaaggagctggtggacctcctggggctggcgcgcctcgaggtcccgggctacgaggcggacgacgtcctggccagcctggccaagaaggcggaaaaggagggctacgaggtccgcatcctcaccgccgacaaagacctttaccagctcctttccgaccgcatccacgccctccaccccgaggggtacctcatcaccccggcctggctttgggaaaagtacggcctgaggcccgaccagtgggccgactaccgggccctgaccggggacgagtccgacaaccttcccggggtcaagggcatcggggagaagacggcgaggaagcttctggaggagtgggggagcctggaagccctcctcaagaacctggaccggctgaagcccgccatccgggagaagatcctggcccacatggacgatctgaagctctcctgggacctggccaaggtgcgcaccgacctgcccctggaggtggacttcgccaaaaggcgggagcccgaccgggagaggcttagggcctttctggagaggcttgagtttggcagcctcctccacgagttcggccttctggaaagccccaaggccctggaggaggccccctggcccccgccggaaggggccttcgtgggctttgtgctttcccgcaaggagcccatgtgggccgatcttctggccctggccgccgccagggggggccgggtccaccgggcccccgagccttataaagccctcagggacctgaaggaggcgcgggggcttctcgccaaagacctgagcgttctggccctgagggaaggccttggcctcccgcccggcgacgaccccatgctcctcgcctacctcctggacccttccaacaccacccccgagggggtggcccggcgctacggcggggagtggacggaggaggcgggggagcgggccgccctttccgagaggctcttcgccaacctgtgggggaggcttgagggggaggagaggctcctttggctttaccgggaggtggagaggcccctttccgctgtcctggcccacatggaggccacgggggtgcgcctggacgtggcctatctcagggccttgtccctggaggtggccgaggagatcgcccgcctcgaggccgaggtcttccgcctggccggccaccccttcaacctcaactcccgggaccagctggaaagggtcctctttgacgagctagggcttcccgccatcggcaagacggagaagaccggcaagcgctccaccagcgccgccgtcctggaggccctccgcgaggcccaccccatcgtggagaagatcctgcagtaccgggagctcaccaagctgaagagcacctacattgaccccttgccggacctcatccaccccaggacgggccgcctccacacccgcttcaaccagacggccacggccacgggcaggctaagtagctccgatcccaacctccagaacatccccgtccgcaccccgcttgggcagaggatccgccgggccttcatcgccgaggaggggtggctattggtggccctggactatagccagatagagctcagggtgctggcccacctctccggcgacgagaacctgatccgggtcttccaggaggggcgggacatccacacggagaccgccagctggatgttcggcgtcccccgggaggccgtggaccccctgatgcgccgggcggccaagaccatcaacttcggggtcctctacggcatgtcggcccaccgcctctcccaggagctagccatcccttacgaggaggcccaggccttcattgagcgctactttcagagcttccccaaggtgcgggcctggattgagaagaccctggaggagggcaggaggcgggggtacgtggagaccctcttcggccgccgccgctacgtgttagacctagaggcccgggtgaagagcgtgcgggaggcggccgagcgcatggccttcaacatgcccgtccagggcaccgccgccgacctcatgaagctggctatggtgaagctcttccccaggctggaggaaatgggggccaggatgctccttcaggtccacgacgagctggtcctcgaggccccaaaagagagggcggaggccgtggcccggctggccaaggaggtcatggagggggtgtatcccctggccgtgcccctggaggtggaggtggggataggggaggactggctctccgccaaggagtgataccaccccatgctggcccaagccagcatgggggccccggcaaaaggtttctggggaagttaccaggcatggtgggccgaaggaaacaggaaacaagggtatgagggttttttgccctaaagaaaggccagggggtcctcccgaaggaaggcttccagggggataccccctgggcccaggagtagcccctttcctccaaaggcctgggtgaaggcttttagccctttggtcctttgggaaggggcgcttttgacctccaaagccagaaggcgccttcccttcttcaagacgaagtcaacctcctggtccctttcccgccagtagtacacctcaaagcccccgtgggggccgtgggccagaaggtgggcgcccacggcggtttccacgagccgccccatgagggcggcgtccgcccacacctcctttggggaaagccccaagaccgccgtgatgagccccgtattaagggccaggagcttggggctcgaggcgcggcgccggaagggctcggcggcgtacttctgcag

SEQ ID NO: 3249 - DNA, 3026 bp, Artificial Sequence
  Description of Artificial Sequence: Synthetic DNA sequence of Thermus aquaticus DNA Polymerase P731K
atgagggggatgctgcccctctttgagcccaagggccgggtcctcctggtggacggccaccacctggcctaccgcaccttccacgccctgaagggcctcaccaccagccggggggagccggtgcaggcggtctacggcttcgccaagagcctcctcaaggccctcaaggaggacggggacgcggtgatcgtggtctttgacgccaaggccccctccttccgccacgaggcctacggggggtacaaggcgggccgggcccccacgccggaggactttccccggcaactcgccctcatcaaggagctggtggacctcctggggctggcgcgcctcgaggtcccgggctacgaggcggacgacgtcctggccagcctggccaagaaggcggaaaaggagggctacgaggtccgcatcctcaccgccgacaaagacctttaccagctcctttccgaccgcatccacgccctccaccccgaggggtacctcatcaccccggcctggctttgggaaaagtacggcctgaggcccgaccagtgggccgactaccgggccctgaccggggacgagtccgacaaccttcccggggtcaagggcatcggggagaagacggcgaggaagcttctggaggagtgggggagcctggaagccctcctcaagaacctggaccggctgaagcccgccatccgggagaagatcctggcccacatggacgatctgaagctctcctgggacctggccaaggtgcgcaccgacctgcccctggaggtggacttcgccaaaaggcgggagcccgaccgggagaggcttagggcctttctggagaggcttgagtttggcagcctcctccacgagttcggccttctggaaagccccaaggccctggaggaggccccctggcccccgccggaaggggccttcgtgggctttgtgctttcccgcaaggagcccatgtgggccgatcttctggccctggccgccgccagggggggccgggtccaccgggcccccgagccttataaagccctcagggacctgaaggaggcgcgggggcttctcgccaaagacctgagcgttctggccctgagggaaggccttggcctcccgcccggcgacgaccccatgctcctcgcctacctcctggacccttccaacaccacccccgagggggtggcccggcgctacggcggggagtggacggaggaggcgggggagcgggccgccctttccgagaggctcttcgccaacctgtgggggaggcttgagggggaggagaggctcctttggctttaccgggaggtggagaggcccctttccgctgtcctggcccacatggaggccacgggggtgcgcctggacgtggcctatctcagggccttgtccctggaggtggccgaggagatcgcccgcctcgaggccgaggtcttccgcctggccggccaccccttcaacctcaactcccgggaccagctggaaagggtcctctttgacgagctagggcttcccgccatcggcaagacggagaagaccggcaagcgctccaccagcgccgccgtcctggaggccctccgcgaggcccaccccatcgtggagaagatcctgcagtaccgggagctcaccaagctgaagagcacctacattgaccccttgccggacctcatccaccccaggacgggccgcctccacacccgcttcaaccagacggccacggccacgggcaggctaagtagctccgatcccaacctccagaacatccccgtccgcaccccgcttgggcagaggatccgccgggccttcatcgccgaggaggggtggctattggtggccctggactatagccagatagagctcagggtgctggcccacctctccggcgacgagaacctgatccgggtcttccaggaggggcgggacatccacacggagaccgccagctggatgttcggcgtcccccgggaggccgtggaccccctgatgcgccgggcggccaagaccatcaacttcggggtcctctacggcatgtcggcccaccgcctctcccaggagctagccatcccttacgaggaggcccaggccttcattgagcgctactttcagagcttccccaaggtgcgggcctggattgagaagaccctggaggagggcaggaggcgggggtacgtggagaccctcttcggccgccgccgctacgtgaaagacctagaggcccgggtgaagagcgtgcgggaggcggccgagcgcatggccttcaacatgcccgtccagggcaccgccgccgacctcatgaagctggctatggtgaagctcttccccaggctggaggaaatgggggccaggatgctccttcaggtccacgacgagctggtcctcgaggccccaaaagagagggcggaggccgtggcccggctggccaaggaggtcatggagggggtgtatcccctggccgtgcccctggaggtggaggtggggataggggaggactggctctccgccaaggagtgataccaccccatgctggcccaagccagcatgggggccccggcaaaaggtttctggggaagttaccaggcatggtgggccgaaggaaacaggaaacaagggtatgagggttttttgccctaaagaaaggccagggggtcctcccgaaggaaggcttccagggggataccccctgggcccaggagtagcccctttcctccaaaggcctgggtgaaggcttttagccctttggtcctttgggaaggggcgcttttgacctccaaagccagaaggcgccttcccttcttcaagacgaagtcaacctcctggtccctttcccgccagtagtacacctcaaagcccccgtgggggccgtgggccagaaggtgggcgcccacggcggtttccacgagccgccccatgagggcggcgtccgcccacacctcctttggggaaagccccaagaccgccgtgatgagccccgtattaagggccaggagcttggggctcgaggcgcggcgccggaagggctcggcggcgtacttctgcag

SEQ ID NO: 3250 - DNA, 3026 bp, Artificial Sequence
  Description of Artificial Sequence: Synthetic DNA sequence of Thermus aquaticus DNA Polymerase P731E
atgagggggatgctgcccctctttgagcccaagggccgggtcctcctggtggacggccaccacctggcctaccgcaccttccacgccctgaagggcctcaccaccagccggggggagccggtgcaggcggtctacggcttcgccaagagcctcctcaaggccctcaaggaggacggggacgcggtgatcgtggtctttgacgccaaggccccctccttccgccacgaggcctacggggggtacaaggcgggccgggcccccacgccggaggactttccccggcaactcgccctcatcaaggagctggtggacctcctggggctggcgcgcctcgaggtcccgggctacgaggcggacgacgtcctggccagcctggccaagaaggcggaaaaggagggctacgaggtccgcatcctcaccgccgacaaagacctttaccagctcctttccgaccgcatccacgccctccaccccgaggggtacctcatcaccccggcctggctttgggaaaagtacggcctgaggcccgaccagtgggccgactaccgggccctgaccggggacgagtccgacaaccttcccggggtcaagggcatcggggagaagacggcgaggaagcttctggaggagtgggggagcctggaagccctcctcaagaacctggaccggctgaagcccgccatccgggagaagatcctggcccacatggacgatctgaagctctcctgggacctggccaaggtgcgcaccgacctgcccctggaggtggacttcgccaaaaggcgggagcccgaccgggagaggcttagggcctttctggagaggcttgagtttggcagcctcctccacgagttcggccttctggaaagccccaaggccctggaggaggccccctggcccccgccggaaggggccttcgtgggctttgtgctttcccgcaaggagcccatgtgggccgatcttctggccctggccgccgccagggggggccgggtccaccgggcccccgagccttataaagccctcagggacctgaaggaggcgcgggggcttctcgccaaagacctgagcgttctggccctgagggaaggccttggcctcccgcccggcgacgaccccatgctcctcgcctacctcctggacccttccaacaccacccccgagggggtggcccggcgctacggcggggagtggacggaggaggcgggggagcgggccgccctttccgagaggctcttcgccaacctgtgggggaggcttgagggggaggagaggctcctttggctttaccgggaggtggagaggcccctttccgctgtcctggcccacatggaggccacgggggtgcgcctggacgtggcctatctcagggccttgtccctggaggtggccgaggagatcgcccgcctcgaggccgaggtcttccgcctggccggccaccccttcaacctcaactcccgggaccagctggaaagggtcctctttgacgagctagggcttcccgccatcggcaagacggagaagaccggcaagcgctccaccagcgccgccgtcctggaggccctccgcgaggcccaccccatcgtggagaagatcctgcagtaccgggagctcaccaagctgaagagcacctacattgaccccttgccggacctcatccaccccaggacgggccgcctccacacccgcttcaaccagacggccacggccacgggcaggctaagtagctccgatcccaacctccagaacatccccgtccgcaccccgcttgggcagaggatccgccgggccttcatcgccgaggaggggtggctattggtggccctggactatagccagatagagctcagggtgctggcccacctctccggcgacgagaacctgatccgggtcttccaggaggggcgggacatccacacggagaccgccagctggatgttcggcgtcccccgggaggccgtggaccccctgatgcgccgggcggccaagaccatcaacttcggggtcctctacggcatgtcggcccaccgcctctcccaggagctagccatcccttacgaggaggcccaggccttcattgagcgctactttcagagcttccccaaggtgcgggcctggattgagaagaccctggaggagggcaggaggcgggggtacgtggagaccctcttcggccgccgccgctacgtggaagacctagaggcccgggtgaagagcgtgcgggaggcggccgagcgcatggccttcaacatgcccgtccagggcaccgccgccgacctcatgaagctggctatggtgaagctcttccccaggctggaggaaatgggggccaggatgctccttcaggtccacgacgagctggtcctcgaggccccaaaagagagggcggaggccgtggcccggctggccaaggaggtcatggagggggtgtatcccctggccgtgcccctggaggtggaggtggggataggggaggactggctctccgccaaggagtgataccaccccatgctggcccaagccagcatgggggccccggcaaaaggtttctggggaagttaccaggcatggtgggccgaaggaaacaggaaacaagggtatgagggttttttgccctaaagaaaggccagggggtcctcccgaaggaaggcttccagggggataccccctgggcccaggagtagcccctttcctccaaaggcctgggtgaaggcttttagccctttggtcctttgggaaggggcgcttttgacctccaaagccagaaggcgccttcccttcttcaagacgaagtcaacctcctggtccctttcccgccagtagtacacctcaaagcccccgtgggggccgtgggccagaaggtgggcgcccacggcggtttccacgagccgccccatgagggcggcgtccgcccacacctcctttggggaaagccccaagaccgccgtgatgagccccgtattaagggccaggagcttggggctcgaggcgcggcgccggaagggctcggcggcgtacttctgcag

SEQ ID NO: 3251 - DNA, 3026 bp, Artificial Sequence
  Description of Artificial Sequence: Synthetic DNA sequence of Thermus aquaticus DNA Polymerase P731D
atgagggggatgctgcccctctttgagcccaagggccgggtcctcctggtggacggccaccacctggcctaccgcaccttccacgccctgaagggcctcaccaccagccggggggagccggtgcaggcggtctacggcttcgccaagagcctcctcaaggccctcaaggaggacggggacgcggtgatcgtggtctttgacgccaaggccccctccttccgccacgaggcctacggggggtacaaggcgggccgggcccccacgccggaggactttccccggcaactcgccctcatcaaggagctggtggacctcctggggctggcgcgcctcgaggtcccgggctacgaggcggacgacgtcctggccagcctggccaagaaggcggaaaaggagggctacgaggtccgcatcctcaccgccgacaaagacctttaccagctcctttccgaccgcatccacgccctccaccccgaggggtacctcatcaccccggcctggctttgggaaaagtacggcctgaggcccgaccagtgggccgactaccgggccctgaccggggacgagtccgacaaccttcccggggtcaagggcatcggggagaagacggcgaggaagcttctggaggagtgggggagcctggaagccctcctcaagaacctggaccggctgaagcccgccatccgggagaagatcctggcccacatggacgatctgaagctctcctgggacctggccaaggtgcgcaccgacctgcccctggaggtggacttcgccaaaaggcgggagcccgaccgggagaggcttagggcctttctggagaggcttgagtttggcagcctcctccacgagttcggccttctggaaagccccaaggccctggaggaggccccctggcccccgccggaaggggccttcgtgggctttgtgctttcccgcaaggagcccatgtgggccgatcttctggccctggccgccgccagggggggccgggtccaccgggcccccgagccttataaagccctcagggacctgaaggaggcgcgggggcttctcgccaaagacctgagcgttctggccctgagggaaggccttggcctcccgcccggcgacgaccccatgctcctcgcctacctcctggacccttccaacaccacccccgagggggtggcccggcgctacggcggggagtggacggaggaggcgggggagcgggccgccctttccgagaggctcttcgccaacctgtgggggaggcttgagggggaggagaggctcctttggctttaccgggaggtggagaggcccctttccgctgtcctggcccacatggaggccacgggggtgcgcctggacgtggcctatctcagggccttgtccctggaggtggccgaggagatcgcccgcctcgaggccgaggtcttccgcctggccggccaccccttcaacctcaactcccgggaccagctggaaagggtcctctttgacgagctagggcttcccgccatcggcaagacggagaagaccggcaagcgctccaccagcgccgccgtcctggaggccctccgcgaggcccaccccatcgtggagaagatcctgcagtaccgggagctcaccaagctgaagagcacctacattgaccccttgccggacctcatccaccccaggacgggccgcctccacacccgcttcaaccagacggccacggccacgggcaggctaagtagctccgatcccaacctccagaacatccccgtccgcaccccgcttgggcagaggatccgccgggccttcatcgccgaggaggggtggctattggtggccctggactatagccagatagagctcagggtgctggcccacctctccggcgacgagaacctgatccgggtcttccaggaggggcgggacatccacacggagaccgccagctggatgttcggcgtcccccgggaggccgtggaccccctgatgcgccgggcggccaagaccatcaacttcggggtcctctacggcatgtcggcccaccgcctctcccaggagctagccatcccttacgaggaggcccaggccttcattgagcgctactttcagagcttccccaaggtgcgggcctggattgagaagaccctggaggagggcaggaggcgggggtacgtggagaccctcttcggccgccgccgctacgtggatgacctagaggcccgggtgaagagcgtgcgggaggcggccgagcgcatggccttcaacatgcccgtccagggcaccgccgccgacctcatgaagctggctatggtgaagctcttccccaggctggaggaaatgggggccaggatgctccttcaggtccacgacgagctggtcctcgaggccccaaaagagagggcggaggccgtggcccggctggccaaggaggtcatggagggggtgtatcccctggccgtgcccctggaggtggaggtggggataggggaggactggctctccgccaaggagtgataccaccccatgctggcccaagccagcatgggggccccggcaaaaggtttctggggaagttaccaggcatggtgggccgaaggaaacaggaaacaagggtatgagggttttttgccctaaagaaaggccagggggtcctcccgaaggaaggcttccagggggataccccctgggcccaggagtagcccctttcctccaaaggcctgggtgaaggcttttagccctttggtcctttgggaaggggcgcttttgacctccaaagccagaaggcgccttcccttcttcaagacgaagtcaacctcctggtccctttcccgccagtagtacacctcaaagcccccgtgggggccgtgggccagaaggtgggcgcccacggcggtttccacgagccgccccatgagggcggcgtccgcccacacctcctttggggaaagccccaagaccgccgtgatgagccccgtattaagggccaggagcttggggctcgaggcgcggcgccggaagggctcggcggcgtacttctgcag

SEQ ID NO: 3252 - DNA, 3026 bp, Artificial Sequence
  Description of Artificial Sequence: Synthetic DNA sequence of Thermus aquaticus DNA Polymerase P731F
atgagggggatgctgcccctctttgagcccaagggccgggtcctcctggtggacggccaccacctggcctaccgcaccttccacgccctgaagggcctcaccaccagccggggggagccggtgcaggcggtctacggcttcgccaagagcctcctcaaggccctcaaggaggacggggacgcggtgatcgtggtctttgacgccaaggccccctccttccgccacgaggcctacggggggtacaaggcgggccgggcccccacgccggaggactttccccggcaactcgccctcatcaaggagctggtggacctcctggggctggcgcgcctcgaggtcccgggctacgaggcggacgacgtcctggccagcctggccaagaaggcggaaaaggagggctacgaggtccgcatcctcaccgccgacaaagacctttaccagctcctttccgaccgcatccacgccctccaccccgaggggtacctcatcaccccggcctggctttgggaaaagtacggcctgaggcccgaccagtgggccgactaccgggccctgaccggggacgagtccgacaaccttcccggggtcaagggcatcggggagaagacggcgaggaagcttctggaggagtgggggagcctggaagccctcctcaagaacctggaccggctgaagcccgccatccgggagaagatcctggcccacatggacgatctgaagctctcctgggacctggccaaggtgcgcaccgacctgcccctggaggtggacttcgccaaaaggcgggagcccgaccgggagaggcttagggcctttctggagaggcttgagtttggcagcctcctccacgagttcggccttctggaaagccccaaggccctggaggaggccccctggcccccgccggaaggggccttcgtgggctttgtgctttcccgcaaggagcccatgtgggccgatcttctggccctggccgccgccagggggggccgggtccaccgggcccccgagccttataaagccctcagggacctgaaggaggcgcgggggcttctcgccaaagacctgagcgttctggccctgagggaaggccttggcctcccgcccggcgacgaccccatgctcctcgcctacctcctggacccttccaacaccacccccgagggggtggcccggcgctacggcggggagtggacggaggaggcgggggagcgggccgccctttccgagaggctcttcgccaacctgtgggggaggcttgagggggaggagaggctcctttggctttaccgggaggtggagaggcccctttccgctgtcctggcccacatggaggccacgggggtgcgcctggacgtggcctatctcagggccttgtccctggaggtggccgaggagatcgcccgcctcgaggccgaggtcttccgcctggccggccaccccttcaacctcaactcccgggaccagctggaaagggtcctctttgacgagctagggcttcccgccatcggcaagacggagaagaccggcaagcgctccaccagcgccgccgtcctggaggccctccgcgaggcccaccccatcgtggagaagatcctgcagtaccgggagctcaccaagctgaagagcacctacattgaccccttgccggacctcatccaccccaggacgggccgcctccacacccgcttcaaccagacggccacggccacgggcaggctaagtagctccgatcccaacctccagaacatccccgtccgcaccccgcttgggcagaggatccgccgggccttcatcgccgaggaggggtggctattggtggccctggactatagccagatagagctcagggtgctggcccacctctccggcgacgagaacctgatccgggtcttccaggaggggcgggacatccacacggagaccgccagctggatgttcggcgtcccccgggaggccgtggaccccctgatgcgccgggcggccaagaccatcaacttcggggtcctctacggcatgtcggcccaccgcctctcccaggagctagccatcccttacgaggaggcccaggccttcattgagcgctactttcagagcttccccaaggtgcgggcctggattgagaagaccctggaggagggcaggaggcgggggtacgtggagaccctcttcggccgccgccgctacgtgtttgacctagaggcccgggtgaagagcgtgcgggaggcggccgagcgcatggccttcaacatgcccgtccagggcaccgccgccgacctcatgaagctggctatggtgaagctcttccccaggctggaggaaatgggggccaggatgctccttcaggtccacgacgagctggtcctcgaggccccaaaagagagggcggaggccgtggcccggctggccaaggaggtcatggagggggtgtatcccctggccgtgcccctggaggtggaggtggggataggggaggactggctctccgccaaggagtgataccaccccatgctggcccaagccagcatgggggccccggcaaaaggtttctggggaagttaccaggcatggtgggccgaaggaaacaggaaacaagggtatgagggttttttgccctaaagaaaggccagggggtcctcccgaaggaaggcttccagggggataccccctgggcccaggagtagcccctttcctccaaaggcctgggtgaaggcttttagccctttggtcctttgggaaggggcgcttttgacctccaaagccagaaggcgccttcccttcttcaagacgaagtcaacctcctggtccctttcccgccagtagtacacctcaaagcccccgtgggggccgtgggccagaaggtgggcgcccacggcggtttccacgagccgccccatgagggcggcgtccgcccacacctcctttggggaaagccccaagaccgccgtgatgagccccgtattaagggccaggagcttggggctcgaggcgcggcgccggaagggctcggcggcgtacttctgcag

SEQ ID NO: 3253 - DNA, 3026 bp, Artificial Sequence
  Description of Artificial Sequence: Synthetic DNA sequence of Thermus aquaticus DNA Polymerase P731S
atgagggggatgctgcccctctttgagcccaagggccgggtcctcctggtggacggccaccacctggcctaccgcaccttccacgccctgaagggcctcaccaccagccggggggagccggtgcaggcggtctacggcttcgccaagagcctcctcaaggccctcaaggaggacggggacgcggtgatcgtggtctttgacgccaaggccccctccttccgccacgaggcctacggggggtacaaggcgggccgggcccccacgccggaggactttccccggcaactcgccctcatcaaggagctggtggacctcctggggctggcgcgcctcgaggtcccgggctacgaggcggacgacgtcctggccagcctggccaagaaggcggaaaaggagggctacgaggtccgcatcctcaccgccgacaaagacctttaccagctcctttccgaccgcatccacgccctccaccccgaggggtacctcatcaccccggcctggctttgggaaaagtacggcctgaggcccgaccagtgggccgactaccgggccctgaccggggacgagtccgacaaccttcccggggtcaagggcatcggggagaagacggcgaggaagcttctggaggagtgggggagcctggaagccctcctcaagaacctggaccggctgaagcccgccatccgggagaagatcctggcccacatggacgatctgaagctctcctgggacctggccaaggtgcgcaccgacctgcccctggaggtggacttcgccaaaaggcgggagcccgaccgggagaggcttagggcctttctggagaggcttgagtttggcagcctcctccacgagttcggccttctggaaagccccaaggccctggaggaggccccctggcccccgccggaaggggccttcgtgggctttgtgctttcccgcaaggagcccatgtgggccgatcttctggccctggccgccgccagggggggccgggtccaccgggcccccgagccttataaagccctcagggacctgaaggaggcgcgggggcttctcgccaaagacctgagcgttctggccctgagggaaggccttggcctcccgcccggcgacgaccccatgctcctcgcctacctcctggacccttccaacaccacccccgagggggtggcccggcgctacggcggggagtggacggaggaggcgggggagcgggccgccctttccgagaggctcttcgccaacctgtgggggaggcttgagggggaggagaggctcctttggctttaccgggaggtggagaggcccctttccgctgtcctggcccacatggaggccacgggggtgcgcctggacgtggcctatctcagggccttgtccctggaggtggccgaggagatcgcccgcctcgaggccgaggtcttccgcctggccggccaccccttcaacctcaactcccgggaccagctggaaagggtcctctttgacgagctagggcttcccgccatcggcaagacggagaagaccggcaagcgctccaccagcgccgccgtcctggaggccctccgcgaggcccaccccatcgtggagaagatcctgcagtaccgggagctcaccaagctgaagagcacctacattgaccccttgccggacctcatccaccccaggacgggccgcctccacacccgcttcaaccagacggccacggccacgggcaggctaagtagctccgatcccaacctccagaacatccccgtccgcaccccgcttgggcagaggatccgccgggccttcatcgccgaggaggggtggctattggtggccctggactatagccagatagagctcagggtgctggcccacctctccggcgacgagaacctgatccgggtcttccaggaggggcgggacatccacacggagaccgccagctggatgttcggcgtcccccgggaggccgtggaccccctgatgcgccgggcggccaagaccatcaacttcggggtcctctacggcatgtcggcccaccgcctctcccaggagctagccatcccttacgaggaggcccaggccttcattgagcgctactttcagagcttccccaaggtgcgggcctggattgagaagaccctggaggagggcaggaggcgggggtacgtggagaccctcttcggccgccgccgctacgtgtctgacctagaggcccgggtgaagagcgtgcgggaggcggccgagcgcatggccttcaacatgcccgtccagggcaccgccgccgacctcatgaagctggctatggtgaagctcttccccaggctggaggaaatgggggccaggatgctccttcaggtccacgacgagctggtcctcgaggccccaaaagagagggcggaggccgtggcccggctggccaaggaggtcatggagggggtgtatcccctggccgtgcccctggaggtggaggtggggataggggaggactggctctccgccaaggagtgataccaccccatgctggcccaagccagcatgggggccccggcaaaaggtttctggggaagttaccaggcatggtgggccgaaggaaacaggaaacaagggtatgagggttttttgccctaaagaaaggccagggggtcctcccgaaggaaggcttccagggggataccccctgggcccaggagtagcccctttcctccaaaggcctgggtgaaggcttttagccctttggtcctttgggaaggggcgcttttgacctccaaagccagaaggcgccttcccttcttcaagacgaagtcaacctcctggtccctttcccgccagtagtacacctcaaagcccccgtgggggccgtgggccagaaggtgggcgcccacggcggtttccacgagccgccccatgagggcggcgtccgcccacacctcctttggggaaagccccaagaccgccgtgatgagccccgtattaagggccaggagcttggggctcgaggcgcggcgccggaagggctcggcggcgtacttctgcag

SEQ ID NO: 3254 - DNA, 3026 bp, Artificial Sequence
  Description of Artificial Sequence: Synthetic DNA sequence of Thermus aquaticus DNA Polymerase P731Y
atgagggggatgctgcccctctttgagcccaagggccgggtcctcctggtggacggccaccacctggcctaccgcaccttccacgccctgaagggcctcaccaccagccggggggagccggtgcaggcggtctacggcttcgccaagagcctcctcaaggccctcaaggaggacggggacgcggtgatcgtggtctttgacgccaaggccccctccttccgccacgaggcctacggggggtacaaggcgggccgggcccccacgccggaggactttccccggcaactcgccctcatcaaggagctggtggacctcctggggctggcgcgcctcgaggtcccgggctacgaggcggacgacgtcctggccagcctggccaagaaggcggaaaaggagggctacgaggtccgcatcctcaccgccgacaaagacctttaccagctcctttccgaccgcatccacgccctccaccccgaggggtacctcatcaccccggcctggctttgggaaaagtacggcctgaggcccgaccagtgggccgactaccgggccctgaccggggacgagtccgacaaccttcccggggtcaagggcatcggggagaagacggcgaggaagcttctggaggagtgggggagcctggaagccctcctcaagaacctggaccggctgaagcccgccatccgggagaagatcctggcccacatggacgatctgaagctctcctgggacctggccaaggtgcgcaccgacctgcccctggaggtggacttcgccaaaaggcgggagcccgaccgggagaggcttagggcctttctggagaggcttgagtttggcagcctcctccacgagttcggccttctggaaagccccaaggccctggaggaggccccctggcccccgccggaaggggccttcgtgggctttgtgctttcccgcaaggagcccatgtgggccgatcttctggccctggccgccgccagggggggccgggtccaccgggcccccgagccttataaagccctcagggacctgaaggaggcgcgggggcttctcgccaaagacctgagcgttctggccctgagggaaggccttggcctcccgcccggcgacgaccccatgctcctcgcctacctcctggacccttccaacaccacccccgagggggtggcccggcgctacggcggggagtggacggaggaggcgggggagcgggccgccctttccgagaggctcttcgccaacctgtgggggaggcttgagggggaggagaggctcctttggctttaccgggaggtggagaggcccctttccgctgtcctggcccacatggaggccacgggggtgcgcctggacgtggcctatctcagggccttgtccctggaggtggccgaggagatcgcccgcctcgaggccgaggtcttccgcctggccggccaccccttcaacctcaactcccgggaccagctggaaagggtcctctttgacgagctagggcttcccgccatcggcaagacggagaagaccggcaagcgctccaccagcgccgccgtcctggaggccctccgcgaggcccaccccatcgtggagaagatcctgcagtaccgggagctcaccaagctgaagagcacctacattgaccccttgccggacctcatccaccccaggacgggccgcctccacacccgcttcaaccagacggccacggccacgggcaggctaagtagctccgatcccaacctccagaacatccccgtccgcaccccgcttgggcagaggatccgccgggccttcatcgccgaggaggggtggctattggtggccctggactatagccagatagagctcagggtgctggcccacctctccggcgacgagaacctgatccgggtcttccaggaggggcgggacatccacacggagaccgccagctggatgttcggcgtcccccgggaggccgtggaccccctgatgcgccgggcggccaagaccatcaacttcggggtcctctacggcatgtcggcccaccgcctctcccaggagctagccatcccttacgaggaggcccaggccttcattgagcgctactttcagagcttccccaaggtgcgggcctggattgagaagaccctggaggagggcaggaggcgggggtacgtggagaccctcttcggccgccgccgctacgtgtatgacctagaggcccgggtgaagagcgtgcgggaggcggccgagcgcatggccttcaacatgcccgtccagggcaccgccgccgacctcatgaagctggctatggtgaagctcttccccaggctggaggaaatgggggccaggatgctccttcaggtccacgacgagctggtcctcgaggccccaaaagagagggcggaggccgtggcccggctggccaaggaggtcatggagggggtgtatcccctggccgtgcccctggaggtggaggtggggataggggaggactggctctccgccaaggagtgataccaccccatgctggcccaagccagcatgggggccccggcaaaaggtttctggggaagttaccaggcatggtgggccgaaggaaacaggaaacaagggtatgagggttttttgccctaaagaaaggccagggggtcctcccgaaggaaggcttccagggggataccccctgggcccaggagtagcccctttcctccaaaggcctgggtgaaggcttttagccctttggtcctttgggaaggggcgcttttgacctccaaagccagaaggcgccttcccttcttcaagacgaagtcaacctcctggtccctttcccgccagtagtacacctcaaagcccccgtgggggccgtgggccagaaggtgggcgcccacggcggtttccacgagccgccccatgagggcggcgtccgcccacacctcctttggggaaagccccaagaccgccgtgatgagccccgtattaagggccaggagcttggggctcgaggcgcggcgccggaagggctcggcggcgtacttctgcag

SEQ ID NO: 3255 - DNA, 3026 bp, Artificial Sequence
  Description of Artificial Sequence: Synthetic DNA sequence of Thermus aquaticus DNA Polymerase P731W
atgagggggatgctgcccctctttgagcccaagggccgggtcctcctggtggacggccaccacctggcctaccgcaccttccacgccctgaagggcctcaccaccagccggggggagccggtgcaggcggtctacggcttcgccaagagcctcctcaaggccctcaaggaggacggggacgcggtgatcgtggtctttgacgccaaggccccctccttccgccacgaggcctacggggggtacaaggcgggccgggcccccacgccggaggactttccccggcaactcgccctcatcaaggagctggtggacctcctggggctggcgcgcctcgaggtcccgggctacgaggcggacgacgtcctggccagcctggccaagaaggcggaaaaggagggctacgaggtccgcatcctcaccgccgacaaagacctttaccagctcctttccgaccgcatccacgccctccaccccgaggggtacctcatcaccccggcctggctttgggaaaagtacggcctgaggcccgaccagtgggccgactaccgggccctgaccggggacgagtccgacaaccttcccggggtcaagggcatcggggagaagacggcgaggaagcttctggaggagtgggggagcctggaagccctcctcaagaacctggaccggctgaagcccgccatccgggagaagatcctggcccacatggacgatctgaagctctcctgggacctggccaaggtgcgcaccgacctgcccctggaggtggacttcgccaaaaggcgggagcccgaccgggagaggcttagggcctttctggagaggcttgagtttggcagcctcctccacgagttcggccttctggaaagccccaaggccctggaggaggccccctggcccccgccggaaggggccttcgtgggctttgtgctttcccgcaaggagcccatgtgggccgatcttctggccctggccgccgccagggggggccgggtccaccgggcccccgagccttataaagccctcagggacctgaaggaggcgcgggggcttctcgccaaagacctgagcgttctggccctgagggaaggccttggcctcccgcccggcgacgaccccatgctcctcgcctacctcctggacccttccaacaccacccccgagggggtggcccggcgctacggcggggagtggacggaggaggcgggggagcgggccgccctttccgagaggctcttcgccaacctgtgggggaggcttgagggggaggagaggctcctttggctttaccgggaggtggagaggcccctttccgctgtcctggcccacatggaggccacgggggtgcgcctggacgtggcctatctcagggccttgtccctggaggtggccgaggagatcgcccgcctcgaggccgaggtcttccgcctggccggccaccccttcaacctcaactcccgggaccagctggaaagggtcctctttgacgagctagggcttcccgccatcggcaagacggagaagaccggcaagcgctccaccagcgccgccgtcctggaggccctccgcgaggcccaccccatcgtggagaagatcctgcagtaccgggagctcaccaagctgaagagcacctacattgaccccttgccggacctcatccaccccaggacgggccgcctccacacccgcttcaaccagacggccacggccacgggcaggctaagtagctccgatcccaacctccagaacatccccgtccgcaccccgcttgggcagaggatccgccgggccttcatcgccgaggaggggtggctattggtggccctggactatagccagatagagctcagggtgctggcccacctctccggcgacgagaacctgatccgggtcttccaggaggggcgggacatccacacggagaccgccagctggatgttcggcgtcccccgggaggccgtggaccccctgatgcgccgggcggccaagaccatcaacttcggggtcctctacggcatgtcggcccaccgcctctcccaggagctagccatcccttacgaggaggcccaggccttcattgagcgctactttcagagcttccccaaggtgcgggcctggattgagaagaccctggaggagggcaggaggcgggggtacgtggagaccctcttcggccgccgccgctacgtgtgggacctagaggcccgggtgaagagcgtgcgggaggcggccgagcgcatggccttcaacatgcccgtccagggcaccgccgccgacctcatgaagctggctatggtgaagctcttccccaggctggaggaaatgggggccaggatgctccttcaggtccacgacgagctggtcctcgaggccccaaaagagagggcggaggccgtggcccggctggccaaggaggtcatggagggggtgtatcccctggccgtgcccctggaggtggaggtggggataggggaggactggctctccgccaaggagtgataccaccccatgctggcccaagccagcatgggggccccggcaaaaggtttctggggaagttaccaggcatggtgggccgaaggaaacaggaaacaagggtatgagggttttttgccctaaagaaaggccagggggtcctcccgaaggaaggcttccagggggataccccctgggcccaggagtagcccctttcctccaaaggcctgggtgaaggcttttagccctttggtcctttgggaaggggcgcttttgacctccaaagccagaaggcgccttcccttcttcaagacgaagtcaacctcctggtccctttcccgccagtagtacacctcaaagcccccgtgggggccgtgggccagaaggtgggcgcccacggcggtttccacgagccgccccatgagggcggcgtccgcccacacctcctttggggaaagccccaagaccgccgtgatgagccccgtattaagggccaggagcttggggctcgaggcgcggcgccggaagggctcggcggcgtacttctgcag

SEQ ID NO: 3256 - DNA, 3026 bp, Artificial Sequence
  Description of Artificial Sequence: Synthetic DNA sequence of Thermus aquaticus DNA Polymerase P731M
atgagggggatgctgcccctctttgagcccaagggccgggtcctcctggtggacggccaccacctggcctaccgcaccttccacgccctgaagggcctcaccaccagccggggggagccggtgcaggcggtctacggcttcgccaagagcctcctcaaggccctcaaggaggacggggacgcggtgatcgtggtctttgacgccaaggccccctccttccgccacgaggcctacggggggtacaaggcgggccgggcccccacgccggaggactttccccggcaactcgccctcatcaaggagctggtggacctcctggggctggcgcgcctcgaggtcccgggctacgaggcggacgacgtcctggccagcctggccaagaaggcggaaaaggagggctacgaggtccgcatcctcaccgccgacaaagacctttaccagctcctttccgaccgcatccacgccctccaccccgaggggtacctcatcaccccggcctggctttgggaaaagtacggcctgaggcccgaccagtgggccgactaccgggccctgaccggggacgagtccgacaaccttcccggggtcaagggcatcggggagaagacggcgaggaagcttctggaggagtgggggagcctggaagccctcctcaagaacctggaccggctgaagcccgccatccgggagaagatcctggcccacatggacgatctgaagctctcctgggacctggccaaggtgcgcaccgacctgcccctggaggtggacttcgccaaaaggcgggagcccgaccgggagaggcttagggcctttctggagaggcttgagtttggcagcctcctccacgagttcggccttctggaaagccccaaggccctggaggaggccccctggcccccgccggaaggggccttcgtgggctttgtgctttcccgcaaggagcccatgtgggccgatcttctggccctggccgccgccagggggggccgggtccaccgggcccccgagccttataaagccctcagggacctgaaggaggcgcgggggcttctcgccaaagacctgagcgttctggccctgagggaaggccttggcctcccgcccggcgacgaccccatgctcctcgcctacctcctggacccttccaacaccacccccgagggggtggcccggcgctacggcggggagtggacggaggaggcgggggagcgggccgccctttccgagaggctcttcgccaacctgtgggggaggcttgagggggaggagaggctcctttggctttaccgggaggtggagaggcccctttccgctgtcctggcccacatggaggccacgggggtgcgcctggacgtggcctatctcagggccttgtccctggaggtggccgaggagatcgcccgcctcgaggccgaggtcttccgcctggccggccaccccttcaacctcaactcccgggaccagctggaaagggtcctctttgacgagctagggcttcccgccatcggcaagacggagaagaccggcaagcgctccaccagcgccgccgtcctggaggccctccgcgaggcccaccccatcgtggagaagatcctgcagtaccgggagctcaccaagctgaagagcacctacattgaccccttgccggacctcatccaccccaggacgggccgcctccacacccgcttcaaccagacggccacggccacgggcaggctaagtagctccgatcccaacctccagaacatccccgtccgcaccccgcttgggcagaggatccgccgggccttcatcgccgaggaggggtggctattggtggccctggactatagccagatagagctcagggtgctggcccacctctccggcgacgagaacctgatccgggtcttccaggaggggcgggacatccacacggagaccgccagctggatgttcggcgtcccccgggaggccgtggaccccctgatgcgccgggcggccaagaccatcaacttcggggtcctctacggcatgtcggcccaccgcctctcccaggagctagccatcccttacgaggaggcccaggccttcattgagcgctactttcagagcttccccaaggtgcgggcctggattgagaagaccctggaggagggcaggaggcgggggtacgtggagaccctcttcggccgccgccgctacgtgatggacctagaggcccgggtgaagagcgtgcgggaggcggccgagcgcatggccttcaacatgcccgtccagggcaccgccgccgacctcatgaagctggctatggtgaagctcttccccaggctggaggaaatgggggccaggatgctccttcaggtccacgacgagctggtcctcgaggccccaaaagagagggcggaggccgtggcccggctggccaaggaggtcatggagggggtgtatcccctggccgtgcccctggaggtggaggtggggataggggaggactggctctccgccaaggagtgataccaccccatgctggcccaagccagcatgggggccccggcaaaaggtttctggggaagttaccaggcatggtgggccgaaggaaacaggaaacaagggtatgagggttttttgccctaaagaaaggccagggggtcctcccgaaggaaggcttccagggggataccccctgggcccaggagtagcccctttcctccaaaggcctgggtgaaggcttttagccctttggtcctttgggaaggggcgcttttgacctccaaagccagaaggcgccttcccttcttcaagacgaagtcaacctcctggtccctttcccgccagtagtacacctcaaagcccccgtgggggccgtgggccagaaggtgggcgcccacggcggtttccacgagccgccccatgagggcggcgtccgcccacacctcctttggggaaagccccaagaccgccgtgatgagccccgtattaagggccaggagcttggggctcgaggcgcggcgccggaagggctcggcggcgtacttctgcag

SEQ ID NO: 3257 - DNA, 3026 bp, Artificial Sequence
  Description of Artificial Sequence: Synthetic DNA sequence of Thermus aquaticus DNA Polymerase P731T
atgagggggatgctgcccctctttgagcccaagggccgggtcctcctggtggacggccaccacctggcctaccgcaccttccacgccctgaagggcctcaccaccagccggggggagccggtgcaggcggtctacggcttcgccaagagcctcctcaaggccctcaaggaggacggggacgcggtgatcgtggtctttgacgccaaggccccctccttccgccacgaggcctacggggggtacaaggcgggccgggcccccacgccggaggactttccccggcaactcgccctcatcaaggagctggtggacctcctggggctggcgcgcctcgaggtcccgggctacgaggcggacgacgtcctggccagcctggccaagaaggcggaaaaggagggctacgaggtccgcatcctcaccgccgacaaagacctttaccagctcctttccgaccgcatccacgccctccaccccgaggggtacctcatcaccccggcctggctttgggaaaagtacggcctgaggcccgaccagtgggccgactaccgggccctgaccggggacgagtccgacaaccttcccggggtcaagggcatcggggagaagacggcgaggaagcttctggaggagtgggggagcctggaagccctcctcaagaacctggaccggctgaagcccgccatccgggagaagatcctggcccacatggacgatctgaagctctcctgggacctggccaaggtgcgcaccgacctgcccctggaggtggacttcgccaaaaggcgggagcccgaccgggagaggcttagggcctttctggagaggcttgagtttggcagcctcctccacgagttcggccttctggaaagccccaaggccctggaggaggccccctggcccccgccggaaggggccttcgtgggctttgtgctttcccgcaaggagcccatgtgggccgatcttctggccctggccgccgccagggggggccgggtccaccgggcccccgagccttataaagccctcagggacctgaaggaggcgcgggggcttctcgccaaagacctgagcgttctggccctgagggaaggccttggcctcccgcccggcgacgaccccatgctcctcgcctacctcctggacccttccaacaccacccccgagggggtggcccggcgctacggcggggagtggacggaggaggcgggggagcgggccgccctttccgagaggctcttcgccaacctgtgggggaggcttgagggggaggagaggctcctttggctttaccgggaggtggagaggcccctttccgctgtcctggcccacatggaggccacgggggtgcgcctggacgtggcctatctcagggccttgtccctggaggtggccgaggagatcgcccgcctcgaggccgaggtcttccgcctggccggccaccccttcaacctcaactcccgggaccagctggaaagggtcctctttgacgagctagggcttcccgccatcggcaagacggagaagaccggcaagcgctccaccagcgccgccgtcctggaggccctccgcgaggcccaccccatcgtggagaagatcctgcagtaccgggagctcaccaagctgaagagcacctacattgaccccttgccggacctcatccaccccaggacgggccgcctccacacccgcttcaaccagacggccacggccacgggcaggctaagtagctccgatcccaacctccagaacatccccgtccgcaccccgcttgggcagaggatccgccgggccttcatcgccgaggaggggtggctattggtggccctggactatagccagatagagctcagggtgctggcccacctctccggcgacgagaacctgatccgggtcttccaggaggggcgggacatccacacggagaccgccagctggatgttcggcgtcccccgggaggccgtggaccccctgatgcgccgggcggccaagaccatcaacttcggggtcctctacggcatgtcggcccaccgcctctcccaggagctagccatcccttacgaggaggcccaggccttcattgagcgctactttcagagcttccccaaggtgcgggcctggattgagaagaccctggaggagggcaggaggcgggggtacgtggagaccctcttcggccgccgccgctacgtgactgacctagaggcccgggtgaagagcgtgcgggaggcggccgagcgcatggccttcaacatgcccgtccagggcaccgccgccgacctcatgaagctggctatggtgaagctcttccccaggctggaggaaatgggggccaggatgctccttcaggtccacgacgagctggtcctcgaggccccaaaagagagggcggaggccgtggcccggctggccaaggaggtcatggagggggtgtatcccctggccgtgcccctggaggtggaggtggggataggggaggactggctctccgccaaggagtgataccaccccatgctggcccaagccagcatgggggccccggcaaaaggtttctggggaagttaccaggcatggtgggccgaaggaaacaggaaacaagggtatgagggttttttgccctaaagaaaggccagggggtcctcccgaaggaaggcttccagggggataccccctgggcccaggagtagcccctttcctccaaaggcctgggtgaaggcttttagccctttggtcctttgggaaggggcgcttttgacctccaaagccagaaggcgccttcccttcttcaagacgaagtcaacctcctggtccctttcccgccagtagtacacctcaaagcccccgtgggggccgtgggccagaaggtgggcgcccacggcggtttccacgagccgccccatgagggcggcgtccgcccacacctcctttggggaaagccccaagaccgccgtgatgagccccgtattaagggccaggagcttggggctcgaggcgcggcgccggaagggctcggcggcgtacttctgcag

SEQ ID NO: 3258 - DNA, 3026 bp, Artificial Sequence
  Description of Artificial Sequence: Synthetic DNA sequence of Thermus aquaticus DNA Polymerase P731N
atgagggggatgctgcccctctttgagcccaagggccgggtcctcctggtggacggccaccacctggcctaccgcaccttccacgccctgaagggcctcaccaccagccggggggagccggtgcaggcggtctacggcttcgccaagagcctcctcaaggccctcaaggaggacggggacgcggtgatcgtggtctttgacgccaaggccccctccttccgccacgaggcctacggggggtacaaggcgggccgggcccccacgccggaggactttccccggcaactcgccctcatcaaggagctggtggacctcctggggctggcgcgcctcgaggtcccgggctacgaggcggacgacgtcctggccagcctggccaagaaggcggaaaaggagggctacgaggtccgcatcctcaccgccgacaaagacctttaccagctcctttccgaccgcatccacgccctccaccccgaggggtacctcatcaccccggcctggctttgggaaaagtacggcctgaggcccgaccagtgggccgactaccgggccctgaccggggacgagtccgacaaccttcccggggtcaagggcatcggggagaagacggcgaggaagcttctggaggagtgggggagcctggaagccctcctcaagaacctggaccggctgaagcccgccatccgggagaagatcctggcccacatggacgatctgaagctctcctgggacctggccaaggtgcgcaccgacctgcccctggaggtggacttcgccaaaaggcgggagcccgaccgggagaggcttagggcctttctggagaggcttgagtttggcagcctcctccacgagttcggccttctggaaagccccaaggccctggaggaggccccctggcccccgccggaaggggccttcgtgggctttgtgctttcccgcaaggagcccatgtgggccgatcttctggccctggccgccgccagggggggccgggtccaccgggcccccgagccttataaagccctcagggacctgaaggaggcgcgggggcttctcgccaaagacctgagcgttctggccctgagggaaggccttggcctcccgcccggcgacgaccccatgctcctcgcctacctcctggacccttccaacaccacccccgagggggtggcccggcgctacggcggggagtggacggaggaggcgggggagcgggccgccctttccgagaggctcttcgccaacctgtgggggaggcttgagggggaggagaggctcctttggctttaccgggaggtggagaggcccctttccgctgtcctggcccacatggaggccacgggggtgcgcctggacgtggcctatctcagggccttgtccctggaggtggccgaggagatcgcccgcctcgaggccgaggtcttccgcctggccggccaccccttcaacctcaactcccgggaccagctggaaagggtcctctttgacgagctagggcttcccgccatcggcaagacggagaagaccggcaagcgctccaccagcgccgccgtcctggaggccctccgcgaggcccaccccatcgtggagaagatcctgcagtaccgggagctcaccaagctgaagagcacctacattgaccccttgccggacctcatccaccccaggacgggccgcctccacacccgcttcaaccagacggccacggccacgggcaggctaagtagctccgatcccaacctccagaacatccccgtccgcaccccgcttgggcagaggatccgccgggccttcatcgccgaggaggggtggctattggtggccctggactatagccagatagagctcagggtgctggcccacctctccggcgacgagaacctgatccgggtcttccaggaggggcgggacatccacacggagaccgccagctggatgttcggcgtcccccgggaggccgtggaccccctgatgcgccgggcggccaagaccatcaacttcggggtcctctacggcatgtcggcccaccgcctctcccaggagctagccatcccttacgaggaggcccaggccttcattgagcgctactttcagagcttccccaaggtgcgggcctggattgagaagaccctggaggagggcaggaggcgggggtacgtggagaccctcttcggccgccgccgctacgtgaatgacctagaggcccgggtgaagagcgtgcgggaggcggccgagcgcatggccttcaacatgcccgtccagggcaccgccgccgacctcatgaagctggctatggtgaagctcttccccaggctggaggaaatgggggccaggatgctccttcaggtccacgacgagctggtcctcgaggccccaaaagagagggcggaggccgtggcccggctggccaaggaggtcatggagggggtgtatcccctggccgtgcccctggaggtggaggtggggataggggaggactggctctccgccaaggagtgataccaccccatgctggcccaagccagcatgggggccccggcaaaaggtttctggggaagttaccaggcatggtgggccgaaggaaacaggaaacaagggtatgagggttttttgccctaaagaaaggccagggggtcctcccgaaggaaggcttccagggggataccccctgggcccaggagtagcccctttcctccaaaggcctgggtgaaggcttttagccctttggtcctttgggaaggggcgcttttgacctccaaagccagaaggcgccttcccttcttcaagacgaagtcaacctcctggtccctttcccgccagtagtacacctcaaagcccccgtgggggccgtgggccagaaggtgggcgcccacggcggtttccacgagccgccccatgagggcggcgtccgcccacacctcctttggggaaagccccaagaccgccgtgatgagccccgtattaagggccaggagcttggggctcgaggcgcggcgccggaagggctcggcggcgtacttctgcag

SEQ ID NO: 3259 - DNA, 3026 bp, Artificial Sequence
  Description of Artificial Sequence: Synthetic DNA sequence of Thermus aquaticus DNA Polymerase P731V
atgagggggatgctgcccctctttgagcccaagggccgggtcctcctggtggacggccaccacctggcctaccgcaccttccacgccctgaagggcctcaccaccagccggggggagccggtgcaggcggtctacggcttcgccaagagcctcctcaaggccctcaaggaggacggggacgcggtgatcgtggtctttgacgccaaggccccctccttccgccacgaggcctacggggggtacaaggcgggccgggcccccacgccggaggactttccccggcaactcgccctcatcaaggagctggtggacctcctggggctggcgcgcctcgaggtcccgggctacgaggcggacgacgtcctggccagcctggccaagaaggcggaaaaggagggctacgaggtccgcatcctcaccgccgacaaagacctttaccagctcctttccgaccgcatccacgccctccaccccgaggggtacctcatcaccccggcctggctttgggaaaagtacggcctgaggcccgaccagtgggccgactaccgggccctgaccggggacgagtccgacaaccttcccggggtcaagggcatcggggagaagacggcgaggaagcttctggaggagtgggggagcctggaagccctcctcaagaacctggaccggctgaagcccgccatccgggagaagatcctggcccacatggacgatctgaagctctcctgggacctggccaaggtgcgcaccgacctgcccctggaggtggacttcgccaaaaggcgggagcccgaccgggagaggcttagggcctttctggagaggcttgagtttggcagcctcctccacgagttcggccttctggaaagccccaaggccctggaggaggccccctggcccccgccggaaggggccttcgtgggctttgtgctttcccgcaaggagcccatgtgggccgatcttctggccctggccgccgccagggggggccgggtccaccgggcccccgagccttataaagccctcagggacctgaaggaggcgcgggggcttctcgccaaagacctgagcgttctggccctgagggaaggccttggcctcccgcccggcgacgaccccatgctcctcgcctacctcctggacccttccaacaccacccccgagggggtggcccggcgctacggcggggagtggacggaggaggcgggggagcgggccgccctttccgagaggctcttcgccaacctgtgggggaggcttgagggggaggagaggctcctttggctttaccgggaggtggagaggcccctttccgctgtcctggcccacatggaggccacgggggtgcgcctggacgtggcctatctcagggccttgtccctggaggtggccgaggagatcgcccgcctcgaggccgaggtcttccgcctggccggccaccccttcaacctcaactcccgggaccagctggaaagggtcctctttgacgagctagggcttcccgccatcggcaagacggagaagaccggcaagcgctccaccagcgccgccgtcctggaggccctccgcgaggcccaccccatcgtggagaagatcctgcagtaccgggagctcaccaagctgaagagcacctacattgaccccttgccggacctcatccaccccaggacgggccgcctccacacccgcttcaaccagacggccacggccacgggcaggctaagtagctccgatcccaacctccagaacatccccgtccgcaccccgcttgggcagaggatccgccgggccttcatcgccgaggaggggtggctattggtggccctggactatagccagatagagctcagggtgctggcccacctctccggcgacgagaacctgatccgggtcttccaggaggggcgggacatccacacggagaccgccagctggatgttcggcgtcccccgggaggccgtggaccccctgatgcgccgggcggccaagaccatcaacttcggggtcctctacggcatgtcggcccaccgcctctcccaggagctagccatcccttacgaggaggcccaggccttcattgagcgctactttcagagcttccccaaggtgcgggcctggattgagaagaccctggaggagggcaggaggcgggggtacgtggagaccctcttcggccgccgccgctacgtggtcgacctagaggcccgggtgaagagcgtgcgggaggcggccgagcgcatggccttcaacatgcccgtccagggcaccgccgccgacctcatgaagctggctatggtgaagctcttccccaggctggaggaaatgggggccaggatgctccttcaggtccacgacgagctggtcctcgaggccccaaaagagagggcggaggccgtggcccggctggccaaggaggtcatggagggggtgtatcccctggccgtgcccctggaggtggaggtggggataggggaggactggctctccgccaaggagtgataccaccccatgctggcccaagccagcatgggggccccggcaaaaggtttctggggaagttaccaggcatggtgggccgaaggaaacaggaaacaagggtatgagggttttttgccctaaagaaaggccagggggtcctcccgaaggaaggcttccagggggataccccctgggcccaggagtagcccctttcctccaaaggcctgggtgaaggcttttagccctttggtcctttgggaaggggcgcttttgacctccaaagccagaaggcgccttcccttcttcaagacgaagtcaacctcctggtccctttcccgccagtagtacacctcaaagcccccgtgggggccgtgggccagaaggtgggcgcccacggcggtttccacgagccgccccatgagggcggcgtccgcccacacctcctttggggaaagccccaagaccgccgtgatgagccccgtattaagggccaggagcttggggctcgaggcgcggcgccggaagggctcggcggcgtacttctgcag

SEQ ID NO: 3260 - DNA, 3026 bp, Artificial Sequence
  Description of Artificial Sequence: Synthetic DNA sequence of Thermus aquaticus DNA Polymerase D732A
atgagggggatgctgcccctctttgagcccaagggccgggtcctcctggtggacggccaccacctggcctaccgcaccttccacgccctgaagggcctcaccaccagccggggggagccggtgcaggcggtctacggcttcgccaagagcctcctcaaggccctcaaggaggacggggacgcggtgatcgtggtctttgacgccaaggccccctccttccgccacgaggcctacggggggtacaaggcgggccgggcccccacgccggaggactttccccggcaactcgccctcatcaaggagctggtggacctcctggggctggcgcgcctcgaggtcccgggctacgaggcggacgacgtcctggccagcctggccaagaaggcggaaaaggagggctacgaggtccgcatcctcaccgccgacaaagacctttaccagctcctttccgaccgcatccacgccctccaccccgaggggtacctcatcaccccggcctggctttgggaaaagtacggcctgaggcccgaccagtgggccgactaccgggccctgaccggggacgagtccgacaaccttcccggggtcaagggcatcggggagaagacggcgaggaagcttctggaggagtgggggagcctggaagccctcctcaagaacctggaccggctgaagcccgccatccgggagaagatcctggcccacatggacgatctgaagctctcctgggacctggccaaggtgcgcaccgacctgcccctggaggtggacttcgccaaaaggcgggagcccgaccgggagaggcttagggcctttctggagaggcttgagtttggcagcctcctccacgagttcggccttctggaaagccccaaggccctggaggaggccccctggcccccgccggaaggggccttcgtgggctttgtgctttcccgcaaggagcccatgtgggccgatcttctggccctggccgccgccagggggggccgggtccaccgggcccccgagccttataaagccctcagggacctgaaggaggcgcgggggcttctcgccaaagacctgagcgttctggccctgagggaaggccttggcctcccgcccggcgacgaccccatgctcctcgcctacctcctggacccttccaacaccacccccgagggggtggcccggcgctacggcggggagtggacggaggaggcgggggagcgggccgccctttccgagaggctcttcgccaacctgtgggggaggcttgagggggaggagaggctcctttggctttaccgggaggtggagaggcccctttccgctgtcctggcccacatggaggccacgggggtgcgcctggacgtggcctatctcagggccttgtccctggaggtggccgaggagatcgcccgcctcgaggccgaggtcttccgcctggccggccaccccttcaacctcaactcccgggaccagctggaaagggtcctctttgacgagctagggcttcccgccatcggcaagacggagaagaccggcaagcgctccaccagcgccgccgtcctggaggccctccgcgaggcccaccccatcgtggagaagatcctgcagtaccgggagctcaccaagctgaagagcacctacattgaccccttgccggacctcatccaccccaggacgggccgcctccacacccgcttcaaccagacggccacggccacgggcaggctaagtagctccgatcccaacctccagaacatccccgtccgcaccccgcttgggcagaggatccgccgggccttcatcgccgaggaggggtggctattggtggccctggactatagccagatagagctcagggtgctggcccacctctccggcgacgagaacctgatccgggtcttccaggaggggcgggacatccacacggagaccgccagctggatgttcggcgtcccccgggaggccgtggaccccctgatgcgccgggcggccaagaccatcaacttcggggtcctctacggcatgtcggcccaccgcctctcccaggagctagccatcccttacgaggaggcccaggccttcattgagcgctactttcagagcttccccaaggtgcgggcctggattgagaagaccctggaggagggcaggaggcgggggtacgtggagaccctcttcggccgccgccgctacgtgccagctctagaggcccgggtgaagagcgtgcgggaggcggccgagcgcatggccttcaacatgcccgtccagggcaccgccgccgacctcatgaagctggctatggtgaagctcttccccaggctggaggaaatgggggccaggatgctccttcaggtccacgacgagctggtcctcgaggccccaaaagagagggcggaggccgtggcccggctggccaaggaggtcatggagggggtgtatcccctggccgtgcccctggaggtggaggtggggataggggaggactggctctccgccaaggagtgataccaccccatgctggcccaagccagcatgggggccccggcaaaaggtttctggggaagttaccaggcatggtgggccgaaggaaacaggaaacaagggtatgagggttttttgccctaaagaaaggccagggggtcctcccgaaggaaggcttccagggggataccccctgggcccaggagtagcccctttcctccaaaggcctgggtgaaggcttttagccctttggtcctttgggaaggggcgcttttgacctccaaagccagaaggcgccttcccttcttcaagacgaagtcaacctcctggtccctttcccgccagtagtacacctcaaagcccccgtgggggccgtgggccagaaggtgggcgcccacggcggtttccacgagccgccccatgagggcggcgtccgcccacacctcctttggggaaagccccaagaccgccgtgatgagccccgtattaagggccaggagcttggggctcgaggcgcggcgccggaagggctcggcggcgtacttctgcag

SEQ ID NO: 3261 - DNA, 3026 bp, Artificial Sequence
  Description of Artificial Sequence: Synthetic DNA sequence of Thermus aquaticus DNA Polymerase D732R
atgagggggatgctgcccctctttgagcccaagggccgggtcctcctggtggacggccaccacctggcctaccgcaccttccacgccctgaagggcctcaccaccagccggggggagccggtgcaggcggtctacggcttcgccaagagcctcctcaaggccctcaaggaggacggggacgcggtgatcgtggtctttgacgccaaggccccctccttccgccacgaggcctacggggggtacaaggcgggccgggcccccacgccggaggactttccccggcaactcgccctcatcaaggagctggtggacctcctggggctggcgcgcctcgaggtcccgggctacgaggcggacgacgtcctggccagcctggccaagaaggcggaaaaggagggctacgaggtccgcatcctcaccgccgacaaagacctttaccagctcctttccgaccgcatccacgccctccaccccgaggggtacctcatcaccccggcctggctttgggaaaagtacggcctgaggcccgaccagtgggccgactaccgggccctgaccggggacgagtccgacaaccttcccggggtcaagggcatcggggagaagacggcgaggaagcttctggaggagtgggggagcctggaagccctcctcaagaacctggaccggctgaagcccgccatccgggagaagatcctggcccacatggacgatctgaagctctcctgggacctggccaaggtgcgcaccgacctgcccctggaggtggacttcgccaaaaggcgggagcccgaccgggagaggcttagggcctttctggagaggcttgagtttggcagcctcctccacgagttcggccttctggaaagccccaaggccctggaggaggccccctggcccccgccggaaggggccttcgtgggctttgtgctttcccgcaaggagcccatgtgggccgatcttctggccctggccgccgccagggggggccgggtccaccgggcccccgagccttataaagccctcagggacctgaaggaggcgcgggggcttctcgccaaagacctgagcgttctggccctgagggaaggccttggcctcccgcccggcgacgaccccatgctcctcgcctacctcctggacccttccaacaccacccccgagggggtggcccggcgctacggcggggagtggacggaggaggcgggggagcgggccgccctttccgagaggctcttcgccaacctgtgggggaggcttgagggggaggagaggctcctttggctttaccgggaggtggagaggcccctttccgctgtcctggcccacatggaggccacgggggtgcgcctggacgtggcctatctcagggccttgtccctggaggtggccgaggagatcgcccgcctcgaggccgaggtcttccgcctggccggccaccccttcaacctcaactcccgggaccagctggaaagggtcctctttgacgagctagggcttcccgccatcggcaagacggagaagaccggcaagcgctccaccagcgccgccgtcctggaggccctccgcgaggcccaccccatcgtggagaagatcctgcagtaccgggagctcaccaagctgaagagcacctacattgaccccttgccggacctcatccaccccaggacgggccgcctccacacccgcttcaaccagacggccacggccacgggcaggctaagtagctccgatcccaacctccagaacatccccgtccgcaccccgcttgggcagaggatccgccgggccttcatcgccgaggaggggtggctattggtggccctggactatagccagatagagctcagggtgctggcccacctctccggcgacgagaacctgatccgggtcttccaggaggggcgggacatccacacggagaccgccagctggatgttcggcgtcccccgggaggccgtggaccccctgatgcgccgggcggccaagaccatcaacttcggggtcctctacggcatgtcggcccaccgcctctcccaggagctagccatcccttacgaggaggcccaggccttcattgagcgctactttcagagcttccccaaggtgcgggcctggattgagaagaccctggaggagggcaggaggcgggggtacgtggagaccctcttcggccgccgccgctacgtgccacgactagaggcccgggtgaagagcgtgcgggaggcggccgagcgcatggccttcaacatgcccgtccagggcaccgccgccgacctcatgaagctggctatggtgaagctcttccccaggctggaggaaatgggggccaggatgctccttcaggtccacgacgagctggtcctcgaggccccaaaagagagggcggaggccgtggcccggctggccaaggaggtcatggagggggtgtatcccctggccgtgcccctggaggtggaggtggggataggggaggactggctctccgccaaggagtgataccaccccatgctggcccaagccagcatgggggccccggcaaaaggtttctggggaagttaccaggcatggtgggccgaaggaaacaggaaacaagggtatgagggttttttgccctaaagaaaggccagggggtcctcccgaaggaaggcttccagggggataccccctgggcccaggagtagcccctttcctccaaaggcctgggtgaaggcttttagccctttggtcctttgggaaggggcgcttttgacctccaaagccagaaggcgccttcccttcttcaagacgaagtcaacctcctggtccctttcccgccagtagtacacctcaaagcccccgtgggggccgtgggccagaaggtgggcgcccacggcggtttccacgagccgccccatgagggcggcgtccgcccacacctcctttggggaaagccccaagaccgccgtgatgagccccgtattaagggccaggagcttggggctcgaggcgcggcgccggaagggctcggcggcgtacttctgcag

SEQ ID NO: 3262 - DNA, 3026 bp, Artificial Sequence
  Description of Artificial Sequence: Synthetic DNA sequence of Thermus aquaticus DNA Polymerase D732C
atgagggggatgctgcccctctttgagcccaagggccgggtcctcctggtggacggccaccacctggcctaccgcaccttccacgccctgaagggcctcaccaccagccggggggagccggtgcaggcggtctacggcttcgccaagagcctcctcaaggccctcaaggaggacggggacgcggtgatcgtggtctttgacgccaaggccccctccttccgccacgaggcctacggggggtacaaggcgggccgggcccccacgccggaggactttccccggcaactcgccctcatcaaggagctggtggacctcctggggctggcgcgcctcgaggtcccgggctacgaggcggacgacgtcctggccagcctggccaagaaggcggaaaaggagggctacgaggtccgcatcctcaccgccgacaaagacctttaccagctcctttccgaccgcatccacgccctccaccccgaggggtacctcatcaccccggcctggctttgggaaaagtacggcctgaggcccgaccagtgggccgactaccgggccctgaccggggacgagtccgacaaccttcccggggtcaagggcatcggggagaagacggcgaggaagcttctggaggagtgggggagcctggaagccctcctcaagaacctggaccggctgaagcccgccatccgggagaagatcctggcccacatggacgatctgaagctctcctgggacctggccaaggtgcgcaccgacctgcccctggaggtggacttcgccaaaaggcgggagcccgaccgggagaggcttagggcctttctggagaggcttgagtttggcagcctcctccacgagttcggccttctggaaagccccaaggccctggaggaggccccctggcccccgccggaaggggccttcgtgggctttgtgctttcccgcaaggagcccatgtgggccgatcttctggccctggccgccgccagggggggccgggtccaccgggcccccgagccttataaagccctcagggacctgaaggaggcgcgggggcttctcgccaaagacctgagcgttctggccctgagggaaggccttggcctcccgcccggcgacgaccccatgctcctcgcctacctcctggacccttccaacaccacccccgagggggtggcccggcgctacggcggggagtggacggaggaggcgggggagcgggccgccctttccgagaggctcttcgccaacctgtgggggaggcttgagggggaggagaggctcctttggctttaccgggaggtggagaggcccctttccgctgtcctggcccacatggaggccacgggggtgcgcctggacgtggcctatctcagggccttgtccctggaggtggccgaggagatcgcccgcctcgaggccgaggtcttccgcctggccggccaccccttcaacctcaactcccgggaccagctggaaagggtcctctttgacgagctagggcttcccgccatcggcaagacggagaagaccggcaagcgctccaccagcgccgccgtcctggaggccctccgcgaggcccaccccatcgtggagaagatcctgcagtaccgggagctcaccaagctgaagagcacctacattgaccccttgccggacctcatccaccccaggacgggccgcctccacacccgcttcaaccagacggccacggccacgggcaggctaagtagctccgatcccaacctccagaacatccccgtccgcaccccgcttgggcagaggatccgccgggccttcatcgccgaggaggggtggctattggtggccctggactatagccagatagagctcagggtgctggcccacctctccggcgacgagaacctgatccgggtcttccaggaggggcgggacatccacacggagaccgccagctggatgttcggcgtcccccgggaggccgtggaccccctgatgcgccgggcggccaagaccatcaacttcggggtcctctacggcatgtcggcccaccgcctctcccaggagctagccatcccttacgaggaggcccaggccttcattgagcgctactttcagagcttccccaaggtgcgggcctggattgagaagaccctggaggagggcaggaggcgggggtacgtggagaccctcttcggccgccgccgctacgtgccatgtctagaggcccgggtgaagagcgtgcgggaggcggccgagcgcatggccttcaacatgcccgtccagggcaccgccgccgacctcatgaagctggctatggtgaagctcttccccaggctggaggaaatgggggccaggatgctccttcaggtccacgacgagctggtcctcgaggccccaaaagagagggcggaggccgtggcccggctggccaaggaggtcatggagggggtgtatcccctggccgtgcccctggaggtggaggtggggataggggaggactggctctccgccaaggagtgataccaccccatgctggcccaagccagcatgggggccccggcaaaaggtttctggggaagttaccaggcatggtgggccgaaggaaacaggaaacaagggtatgagggttttttgccctaaagaaaggccagggggtcctcccgaaggaaggcttccagggggataccccctgggcccaggagtagcccctttcctccaaaggcctgggtgaaggcttttagccctttggtcctttgggaaggggcgcttttgacctccaaagccagaaggcgccttcccttcttcaagacgaagtcaacctcctggtccctttcccgccagtagtacacctcaaagcccccgtgggggccgtgggccagaaggtgggcgcccacggcggtttccacgagccgccccatgagggcggcgtccgcccacacctcctttggggaaagccccaagaccgccgtgatgagccccgtattaagggccaggagcttggggctcgaggcgcggcgccggaagggctcggcggcgtacttctgcag

SEQ ID NO: 3263 - DNA, 3026 bp, Artificial Sequence
  Description of Artificial Sequence: Synthetic DNA sequence of Thermus aquaticus DNA Polymerase D732G
atgagggggatgctgcccctctttgagcccaagggccgggtcctcctggtggacggccaccacctggcctaccgcaccttccacgccctgaagggcctcaccaccagccggggggagccggtgcaggcggtctacggcttcgccaagagcctcctcaaggccctcaaggaggacggggacgcggtgatcgtggtctttgacgccaaggccccctccttccgccacgaggcctacggggggtacaaggcgggccgggcccccacgccggaggactttccccggcaactcgccctcatcaaggagctggtggacctcctggggctggcgcgcctcgaggtcccgggctacgaggcggacgacgtcctggccagcctggccaagaaggcggaaaaggagggctacgaggtccgcatcctcaccgccgacaaagacctttaccagctcctttccgaccgcatccacgccctccaccccgaggggtacctcatcaccccggcctggctttgggaaaagtacggcctgaggcccgaccagtgggccgactaccgggccctgaccggggacgagtccgacaaccttcccggggtcaagggcatcggggagaagacggcgaggaagcttctggaggagtgggggagcctggaagccctcctcaagaacctggaccggctgaagcccgccatccgggagaagatcctggcccacatggacgatctgaagctctcctgggacctggccaaggtgcgcaccgacctgcccctggaggtggacttcgccaaaaggcgggagcccgaccgggagaggcttagggcctttctggagaggcttgagtttggcagcctcctccacgagttcggccttctggaaagccccaaggccctggaggaggccccctggcccccgccggaaggggccttcgtgggctttgtgctttcccgcaaggagcccatgtgggccgatcttctggccctggccgccgccagggggggccgggtccaccgggcccccgagccttataaagccctcagggacctgaaggaggcgcgggggcttctcgccaaagacctgagcgttctggccctgagggaaggccttggcctcccgcccggcgacgaccccatgctcctcgcctacctcctggacccttccaacaccacccccgagggggtggcccggcgctacggcggggagtggacggaggaggcgggggagcgggccgccctttccgagaggctcttcgccaacctgtgggggaggcttgagggggaggagaggctcctttggctttaccgggaggtggagaggcccctttccgctgtcctggcccacatggaggccacgggggtgcgcctggacgtggcctatctcagggccttgtccctggaggtggccgaggagatcgcccgcctcgaggccgaggtcttccgcctggccggccaccccttcaacctcaactcccgggaccagctggaaagggtcctctttgacgagctagggcttcccgccatcggcaagacggagaagaccggcaagcgctccaccagcgccgccgtcctggaggccctccgcgaggcccaccccatcgtggagaagatcctgcagtaccgggagctcaccaagctgaagagcacctacattgaccccttgccggacctcatccaccccaggacgggccgcctccacacccgcttcaaccagacggccacggccacgggcaggctaagtagctccgatcccaacctccagaacatccccgtccgcaccccgcttgggcagaggatccgccgggccttcatcgccgaggaggggtggctattggtggccctggactatagccagatagagctcagggtgctggcccacctctccggcgacgagaacctgatccgggtcttccaggaggggcgggacatccacacggagaccgccagctggatgttcggcgtcccccgggaggccgtggaccccctgatgcgccgggcggccaagaccatcaacttcggggtcctctacggcatgtcggcccaccgcctctcccaggagctagccatcccttacgaggaggcccaggccttcattgagcgctactttcagagcttccccaaggtgcgggcctggattgagaagaccctggaggagggcaggaggcgggggtacgtggagaccctcttcggccgccgccgctacgtgccaggtctagaggcccgggtgaagagcgtgcgggaggcggccgagcgcatggccttcaacatgcccgtccagggcaccgccgccgacctcatgaagctggctatggtgaagctcttccccaggctggaggaaatgggggccaggatgctccttcaggtccacgacgagctggtcctcgaggccccaaaagagagggcggaggccgtggcccggctggccaaggaggtcatggagggggtgtatcccctggccgtgcccctggaggtggaggtggggataggggaggactggctctccgccaaggagtgataccaccccatgctggcccaagccagcatgggggccccggcaaaaggtttctggggaagttaccaggcatggtgggccgaaggaaacaggaaacaagggtatgagggttttttgccctaaagaaaggccagggggtcctcccgaaggaaggcttccagggggataccccctgggcccaggagtagcccctttcctccaaaggcctgggtgaaggcttttagccctttggtcctttgggaaggggcgcttttgacctccaaagccagaaggcgccttcccttcttcaagacgaagtcaacctcctggtccctttcccgccagtagtacacctcaaagcccccgtgggggccgtgggccagaaggtgggcgcccacggcggtttccacgagccgccccatgagggcggcgtccgcccacacctcctttggggaaagccccaagaccgccgtgatgagccccgtattaagggccaggagcttggggctcgaggcgcggcgccggaagggctcggcggcgtacttctgcag

SEQ ID NO: 3264 - DNA, 3026 bp, Artificial Sequence
  Description of Artificial Sequence: Synthetic DNA sequence of Thermus aquaticus DNA Polymerase D732Q
atgagggggatgctgcccctctttgagcccaagggccgggtcctcctggtggacggccaccacctggcctaccgcaccttccacgccctgaagggcctcaccaccagccggggggagccggtgcaggcggtctacggcttcgccaagagcctcctcaaggccctcaaggaggacggggacgcggtgatcgtggtctttgacgccaaggccccctccttccgccacgaggcctacggggggtacaaggcgggccgggcccccacgccggaggactttccccggcaactcgccctcatcaaggagctggtggacctcctggggctggcgcgcctcgaggtcccgggctacgaggcggacgacgtcctggccagcctggccaagaaggcggaaaaggagggctacgaggtccgcatcctcaccgccgacaaagacctttaccagctcctttccgaccgcatccacgccctccaccccgaggggtacctcatcaccccggcctggctttgggaaaagtacggcctgaggcccgaccagtgggccgactaccgggccctgaccggggacgagtccgacaaccttcccggggtcaagggcatcggggagaagacggcgaggaagcttctggaggagtgggggagcctggaagccctcctcaagaacctggaccggctgaagcccgccatccgggagaagatcctggcccacatggacgatctgaagctctcctgggacctggccaaggtgcgcaccgacctgcccctggaggtggacttcgccaaaaggcgggagcccgaccgggagaggcttagggcctttctggagaggcttgagtttggcagcctcctccacgagttcggccttctggaaagccccaaggccctggaggaggccccctggcccccgccggaaggggccttcgtgggctttgtgctttcccgcaaggagcccatgtgggccgatcttctggccctggccgccgccagggggggccgggtccaccgggcccccgagccttataaagccctcagggacctgaaggaggcgcgggggcttctcgccaaagacctgagcgttctggccctgagggaaggccttggcctcccgcccggcgacgaccccatgctcctcgcctacctcctggacccttccaacaccacccccgagggggtggcccggcgctacggcggggagtggacggaggaggcgggggagcgggccgccctttccgagaggctcttcgccaacctgtgggggaggcttgagggggaggagaggctcctttggctttaccgggaggtggagaggcccctttccgctgtcctggcccacatggaggccacgggggtgcgcctggacgtggcctatctcagggccttgtccctggaggtggccgaggagatcgcccgcctcgaggccgaggtcttccgcctggccggccaccccttcaacctcaactcccgggaccagctggaaagggtcctctttgacgagctagggcttcccgccatcggcaagacggagaagaccggcaagcgctccaccagcgccgccgtcctggaggccctccgcgaggcccaccccatcgtggagaagatcctgcagtaccgggagctcaccaagctgaagagcacctacattgaccccttgccggacctcatccaccccaggacgggccgcctccacacccgcttcaaccagacggccacggccacgggcaggctaagtagctccgatcccaacctccagaacatccccgtccgcaccccgcttgggcagaggatccgccgggccttcatcgccgaggaggggtggctattggtggccctggactatagccagatagagctcagggtgctggcccacctctccggcgacgagaacctgatccgggtcttccaggaggggcgggacatccacacggagaccgccagctggatgttcggcgtcccccgggaggccgtggaccccctgatgcgccgggcggccaagaccatcaacttcggggtcctctacggcatgtcggcccaccgcctctcccaggagctagccatcccttacgaggaggcccaggccttcattgagcgctactttcagagcttccccaaggtgcgggcctggattgagaagaccctggaggagggcaggaggcgggggtacgtggagaccctcttcggccgccgccgctacgtgccacaactagaggcccgggtgaagagcgtgcgggaggcggccgagcgcatggccttcaacatgcccgtccagggcaccgccgccgacctcatgaagctggctatggtgaagctcttccccaggctggaggaaatgggggccaggatgctccttcaggtccacgacgagctggtcctcgaggccccaaaagagagggcggaggccgtggcccggctggccaaggaggtcatggagggggtgtatcccctggccgtgcccctggaggtggaggtggggataggggaggactggctctccgccaaggagtgataccaccccatgctggcccaagccagcatgggggccccggcaaaaggtttctggggaagttaccaggcatggtgggccgaaggaaacaggaaacaagggtatgagggttttttgccctaaagaaaggccagggggtcctcccgaaggaaggcttccagggggataccccctgggcccaggagtagcccctttcctccaaaggcctgggtgaaggcttttagccctttggtcctttgggaaggggcgcttttgacctccaaagccagaaggcgccttcccttcttcaagacgaagtcaacctcctggtccctttcccgccagtagtacacctcaaagcccccgtgggggccgtgggccagaaggtgggcgcccacggcggtttccacgagccgccccatgagggcggcgtccgcccacacctcctttggggaaagccccaagaccgccgtgatgagccccgtattaagggccaggagcttggggctcgaggcgcggcgccggaagggctcggcggcgtacttctgcag

SEQ ID NO: 3265 - DNA, 3026 bp, Artificial Sequence
  Description of Artificial Sequence: Synthetic DNA sequence of Thermus aquaticus DNA Polymerase D732H
atgagggggatgctgcccctctttgagcccaagggccgggtcctcctggtggacggccaccacctggcctaccgcaccttccacgccctgaagggcctcaccaccagccggggggagccggtgcaggcggtctacggcttcgccaagagcctcctcaaggccctcaaggaggacggggacgcggtgatcgtggtctttgacgccaaggccccctccttccgccacgaggcctacggggggtacaaggcgggccgggcccccacgccggaggactttccccggcaactcgccctcatcaaggagctggtggacctcctggggctggcgcgcctcgaggtcccgggctacgaggcggacgacgtcctggccagcctggccaagaaggcggaaaaggagggctacgaggtccgcatcctcaccgccgacaaagacctttaccagctcctttccgaccgcatccacgccctccaccccgaggggtacctcatcaccccggcctggctttgggaaaagtacggcctgaggcccgaccagtgggccgactaccgggccctgaccggggacgagtccgacaaccttcccggggtcaagggcatcggggagaagacggcgaggaagcttctggaggagtgggggagcctggaagccctcctcaagaacctggaccggctgaagcccgccatccgggagaagatcctggcccacatggacgatctgaagctctcctgggacctggccaaggtgcgcaccgacctgcccctggaggtggacttcgccaaaaggcgggagcccgaccgggagaggcttagggcctttctggagaggcttgagtttggcagcctcctccacgagttcggccttctggaaagccccaaggccctggaggaggccccctggcccccgccggaaggggccttcgtgggctttgtgctttcccgcaaggagcccatgtgggccgatcttctggccctggccgccgccagggggggccgggtccaccgggcccccgagccttataaagccctcagggacctgaaggaggcgcgggggcttctcgccaaagacctgagcgttctggccctgagggaaggccttggcctcccgcccggcgacgaccccatgctcctcgcctacctcctggacccttccaacaccacccccgagggggtggcccggcgctacggcggggagtggacggaggaggcgggggagcgggccgccctttccgagaggctcttcgccaacctgtgggggaggcttgagggggaggagaggctcctttggctttaccgggaggtggagaggcccctttccgctgtcctggcccacatggaggccacgggggtgcgcctggacgtggcctatctcagggccttgtccctggaggtggccgaggagatcgcccgcctcgaggccgaggtcttccgcctggccggccaccccttcaacctcaactcccgggaccagctggaaagggtcctctttgacgagctagggcttcccgccatcggcaagacggagaagaccggcaagcgctccaccagcgccgccgtcctggaggccctccgcgaggcccaccccatcgtggagaagatcctgcagtaccgggagctcaccaagctgaagagcacctacattgaccccttgccggacctcatccaccccaggacgggccgcctccacacccgcttcaaccagacggccacggccacgggcaggctaagtagctccgatcccaacctccagaacatccccgtccgcaccccgcttgggcagaggatccgccgggccttcatcgccgaggaggggtggctattggtggccctggactatagccagatagagctcagggtgctggcccacctctccggcgacgagaacctgatccgggtcttccaggaggggcgggacatccacacggagaccgccagctggatgttcggcgtcccccgggaggccgtggaccccctgatgcgccgggcggccaagaccatcaacttcggggtcctctacggcatgtcggcccaccgcctctcccaggagctagccatcccttacgaggaggcccaggccttcattgagcgctactttcagagcttccccaaggtgcgggcctggattgagaagaccctggaggagggcaggaggcgggggtacgtggagaccctcttcggccgccgccgctacgtgccacatctagaggcccgggtgaagagcgtgcgggaggcggccgagcgcatggccttcaacatgcccgtccagggcaccgccgccgacctcatgaagctggctatggtgaagctcttccccaggctggaggaaatgggggccaggatgctccttcaggtccacgacgagctggtcctcgaggccccaaaagagagggcggaggccgtggcccggctggccaaggaggtcatggagggggtgtatcccctggccgtgcccctggaggtggaggtggggataggggaggactggctctccgccaaggagtgataccaccccatgctggcccaagccagcatgggggccccggcaaaaggtttctggggaagttaccaggcatggtgggccgaaggaaacaggaaacaagggtatgagggttttttgccctaaagaaaggccagggggtcctcccgaaggaaggcttccagggggataccccctgggcccaggagtagcccctttcctccaaaggcctgggtgaaggcttttagccctttggtcctttgggaaggggcgcttttgacctccaaagccagaaggcgccttcccttcttcaagacgaagtcaacctcctggtccctttcccgccagtagtacacctcaaagcccccgtgggggccgtgggccagaaggtgggcgcccacggcggtttccacgagccgccccatgagggcggcgtccgcccacacctcctttggggaaagccccaagaccgccgtgatgagccccgtattaagggccaggagcttggggctcgaggcgcggcgccggaagggctcggcggcgtacttctgcag

SEQ ID NO: 3266 - DNA, 3026 bp, Artificial Sequence
  Description of Artificial Sequence: Synthetic DNA sequence of Thermus aquaticus DNA Polymerase D732I
atgagggggatgctgcccctctttgagcccaagggccgggtcctcctggtggacggccaccacctggcctaccgcaccttccacgccctgaagggcctcaccaccagccggggggagccggtgcaggcggtctacggcttcgccaagagcctcctcaaggccctcaaggaggacggggacgcggtgatcgtggtctttgacgccaaggccccctccttccgccacgaggcctacggggggtacaaggcgggccgggcccccacgccggaggactttccccggcaactcgccctcatcaaggagctggtggacctcctggggctggcgcgcctcgaggtcccgggctacgaggcggacgacgtcctggccagcctggccaagaaggcggaaaaggagggctacgaggtccgcatcctcaccgccgacaaagacctttaccagctcctttccgaccgcatccacgccctccaccccgaggggtacctcatcaccccggcctggctttgggaaaagtacggcctgaggcccgaccagtgggccgactaccgggccctgaccggggacgagtccgacaaccttcccggggtcaagggcatcggggagaagacggcgaggaagcttctggaggagtgggggagcctggaagccctcctcaagaacctggaccggctgaagcccgccatccgggagaagatcctggcccacatggacgatctgaagctctcctgggacctggccaaggtgcgcaccgacctgcccctggaggtggacttcgccaaaaggcgggagcccgaccgggagaggcttagggcctttctggagaggcttgagtttggcagcctcctccacgagttcggccttctggaaagccccaaggccctggaggaggccccctggcccccgccggaaggggccttcgtgggctttgtgctttcccgcaaggagcccatgtgggccgatcttctggccctggccgccgccagggggggccgggtccaccgggcccccgagccttataaagccctcagggacctgaaggaggcgcgggggcttctcgccaaagacctgagcgttctggccctgagggaaggccttggcctcccgcccggcgacgaccccatgctcctcgcctacctcctggacccttccaacaccacccccgagggggtggcccggcgctacggcggggagtggacggaggaggcgggggagcgggccgccctttccgagaggctcttcgccaacctgtgggggaggcttgagggggaggagaggctcctttggctttaccgggaggtggagaggcccctttccgctgtcctggcccacatggaggccacgggggtgcgcctggacgtggcctatctcagggccttgtccctggaggtggccgaggagatcgcccgcctcgaggccgaggtcttccgcctggccggccaccccttcaacctcaactcccgggaccagctggaaagggtcctctttgacgagctagggcttcccgccatcggcaagacggagaagaccggcaagcgctccaccagcgccgccgtcctggaggccctccgcgaggcccaccccatcgtggagaagatcctgcagtaccgggagctcaccaagctgaagagcacctacattgaccccttgccggacctcatccaccccaggacgggccgcctccacacccgcttcaaccagacggccacggccacgggcaggctaagtagctccgatcccaacctccagaacatccccgtccgcaccccgcttgggcagaggatccgccgggccttcatcgccgaggaggggtggctattggtggccctggactatagccagatagagctcagggtgctggcccacctctccggcgacgagaacctgatccgggtcttccaggaggggcgggacatccacacggagaccgccagctggatgttcggcgtcccccgggaggccgtggaccccctgatgcgccgggcggccaagaccatcaacttcggggtcctctacggcatgtcggcccaccgcctctcccaggagctagccatcccttacgaggaggcccaggccttcattgagcgctactttcagagcttccccaaggtgcgggcctggattgagaagaccctggaggagggcaggaggcgggggtacgtggagaccctcttcggccgccgccgctacgtgccaattctagaggcccgggtgaagagcgtgcgggaggcggccgagcgcatggccttcaacatgcccgtccagggcaccgccgccgacctcatgaagctggctatggtgaagctcttccccaggctggaggaaatgggggccaggatgctccttcaggtccacgacgagctggtcctcgaggccccaaaagagagggcggaggccgtggcccggctggccaaggaggtcatggagggggtgtatcccctggccgtgcccctggaggtggaggtggggataggggaggactggctctccgccaaggagtgataccaccccatgctggcccaagccagcatgggggccccggcaaaaggtttctggggaagttaccaggcatggtgggccgaaggaaacaggaaacaagggtatgagggttttttgccctaaagaaaggccagggggtcctcccgaaggaaggcttccagggggataccccctgggcccaggagtagcccctttcctccaaaggcctgggtgaaggcttttagccctttggtcctttgggaaggggcgcttttgacctccaaagccagaaggcgccttcccttcttcaagacgaagtcaacctcctggtccctttcccgccagtagtacacctcaaagcccccgtgggggccgtgggccagaaggtgggcgcccacggcggtttccacgagccgccccatgagggcggcgtccgcccacacctcctttggggaaagccccaagaccgccgtgatgagccccgtattaagggccaggagcttggggctcgaggcgcggcgccggaagggctcggcggcgtacttctgcag

SEQ ID NO: 3267 - DNA, 3026 bp, Artificial Sequence
  Description of Artificial Sequence: Synthetic DNA sequence of Thermus aquaticus DNA Polymerase D732L
atgagggggatgctgcccctctttgagcccaagggccgggtcctcctggtggacggccaccacctggcctaccgcaccttccacgccctgaagggcctcaccaccagccggggggagccggtgcaggcggtctacggcttcgccaagagcctcctcaaggccctcaaggaggacggggacgcggtgatcgtggtctttgacgccaaggccccctccttccgccacgaggcctacggggggtacaaggcgggccgggcccccacgccggaggactttccccggcaactcgccctcatcaaggagctggtggacctcctggggctggcgcgcctcgaggtcccgggctacgaggcggacgacgtcctggccagcctggccaagaaggcggaaaaggagggctacgaggtccgcatcctcaccgccgacaaagacctttaccagctcctttccgaccgcatccacgccctccaccccgaggggtacctcatcaccccggcctggctttgggaaaagtacggcctgaggcccgaccagtgggccgactaccgggccctgaccggggacgagtccgacaaccttcccggggtcaagggcatcggggagaagacggcgaggaagcttctggaggagtgggggagcctggaagccctcctcaagaacctggaccggctgaagcccgccatccgggagaagatcctggcccacatggacgatctgaagctctcctgggacctggccaaggtgcgcaccgacctgcccctggaggtggacttcgccaaaaggcgggagcccgaccgggagaggcttagggcctttctggagaggcttgagtttggcagcctcctccacgagttcggccttctggaaagccccaaggccctggaggaggccccctggcccccgccggaaggggccttcgtgggctttgtgctttcccgcaaggagcccatgtgggccgatcttctggccctggccgccgccagggggggccgggtccaccgggcccccgagccttataaagccctcagggacctgaaggaggcgcgggggcttctcgccaaagacctgagcgttctggccctgagggaaggccttggcctcccgcccggcgacgaccccatgctcctcgcctacctcctggacccttccaacaccacccccgagggggtggcccggcgctacggcggggagtggacggaggaggcgggggagcgggccgccctttccgagaggctcttcgccaacctgtgggggaggcttgagggggaggagaggctcctttggctttaccgggaggtggagaggcccctttccgctgtcctggcccacatggaggccacgggggtgcgcctggacgtggcctatctcagggccttgtccctggaggtggccgaggagatcgcccgcctcgaggccgaggtcttccgcctggccggccaccccttcaacctcaactcccgggaccagctggaaagggtcctctttgacgagctagggcttcccgccatcggcaagacggagaagaccggcaagcgctccaccagcgccgccgtcctggaggccctccgcgaggcccaccccatcgtggagaagatcctgcagtaccgggagctcaccaagctgaagagcacctacattgaccccttgccggacctcatccaccccaggacgggccgcctccacacccgcttcaaccagacggccacggccacgggcaggctaagtagctccgatcccaacctccagaacatccccgtccgcaccccgcttgggcagaggatccgccgggccttcatcgccgaggaggggtggctattggtggccctggactatagccagatagagctcagggtgctggcccacctctccggcgacgagaacctgatccgggtcttccaggaggggcgggacatccacacggagaccgccagctggatgttcggcgtcccccgggaggccgtggaccccctgatgcgccgggcggccaagaccatcaacttcggggtcctctacggcatgtcggcccaccgcctctcccaggagctagccatcccttacgaggaggcccaggccttcattgagcgctactttcagagcttccccaaggtgcgggcctggattgagaagaccctggaggagggcaggaggcgggggtacgtggagaccctcttcggccgccgccgctacgtgccattactagaggcccgggtgaagagcgtgcgggaggcggccgagcgcatggccttcaacatgcccgtccagggcaccgccgccgacctcatgaagctggctatggtgaagctcttccccaggctggaggaaatgggggccaggatgctccttcaggtccacgacgagctggtcctcgaggccccaaaagagagggcggaggccgtggcccggctggccaaggaggtcatggagggggtgtatcccctggccgtgcccctggaggtggaggtggggataggggaggactggctctccgccaaggagtgataccaccccatgctggcccaagccagcatgggggccccggcaaaaggtttctggggaagttaccaggcatggtgggccgaaggaaacaggaaacaagggtatgagggttttttgccctaaagaaaggccagggggtcctcccgaaggaaggcttccagggggataccccctgggcccaggagtagcccctttcctccaaaggcctgggtgaaggcttttagccctttggtcctttgggaaggggcgcttttgacctccaaagccagaaggcgccttcccttcttcaagacgaagtcaacctcctggtccctttcccgccagtagtacacctcaaagcccccgtgggggccgtgggccagaaggtgggcgcccacggcggtttccacgagccgccccatgagggcggcgtccgcccacacctcctttggggaaagccccaagaccgccgtgatgagccccgtattaagggccaggagcttggggctcgaggcgcggcgccggaagggctcggcggcgtacttctgcag

SEQ ID NO: 3268 - DNA, 3026 bp, Artificial Sequence
  Description of Artificial Sequence: Synthetic DNA sequence of Thermus aquaticus DNA Polymerase D732K
atgagggggatgctgcccctctttgagcccaagggccgggtcctcctggtggacggccaccacctggcctaccgcaccttccacgccctgaagggcctcaccaccagccggggggagccggtgcaggcggtctacggcttcgccaagagcctcctcaaggccctcaaggaggacggggacgcggtgatcgtggtctttgacgccaaggccccctccttccgccacgaggcctacggggggtacaaggcgggccgggcccccacgccggaggactttccccggcaactcgccctcatcaaggagctggtggacctcctggggctggcgcgcctcgaggtcccgggctacgaggcggacgacgtcctggccagcctggccaagaaggcggaaaaggagggctacgaggtccgcatcctcaccgccgacaaagacctttaccagctcctttccgaccgcatccacgccctccaccccgaggggtacctcatcaccccggcctggctttgggaaaagtacggcctgaggcccgaccagtgggccgactaccgggccctgaccggggacgagtccgacaaccttcccggggtcaagggcatcggggagaagacggcgaggaagcttctggaggagtgggggagcctggaagccctcctcaagaacctggaccggctgaagcccgccatccgggagaagatcctggcccacatggacgatctgaagctctcctgggacctggccaaggtgcgcaccgacctgcccctggaggtggacttcgccaaaaggcgggagcccgaccgggagaggcttagggcctttctggagaggcttgagtttggcagcctcctccacgagttcggccttctggaaagccccaaggccctggaggaggccccctggcccccgccggaaggggccttcgtgggctttgtgctttcccgcaaggagcccatgtgggccgatcttctggccctggccgccgccagggggggccgggtccaccgggcccccgagccttataaagccctcagggacctgaaggaggcgcgggggcttctcgccaaagacctgagcgttctggccctgagggaaggccttggcctcccgcccggcgacgaccccatgctcctcgcctacctcctggacccttccaacaccacccccgagggggtggcccggcgctacggcggggagtggacggaggaggcgggggagcgggccgccctttccgagaggctcttcgccaacctgtgggggaggcttgagggggaggagaggctcctttggctttaccgggaggtggagaggcccctttccgctgtcctggcccacatggaggccacgggggtgcgcctggacgtggcctatctcagggccttgtccctggaggtggccgaggagatcgcccgcctcgaggccgaggtcttccgcctggccggccaccccttcaacctcaactcccgggaccagctggaaagggtcctctttgacgagctagggcttcccgccatcggcaagacggagaagaccggcaagcgctccaccagcgccgccgtcctggaggccctccgcgaggcccaccccatcgtggagaagatcctgcagtaccgggagctcaccaagctgaagagcacctacattgaccccttgccggacctcatccaccccaggacgggccgcctccacacccgcttcaaccagacggccacggccacgggcaggctaagtagctccgatcccaacctccagaacatccccgtccgcaccccgcttgggcagaggatccgccgggccttcatcgccgaggaggggtggctattggtggccctggactatagccagatagagctcagggtgctggcccacctctccggcgacgagaacctgatccgggtcttccaggaggggcgggacatccacacggagaccgccagctggatgttcggcgtcccccgggaggccgtggaccccctgatgcgccgggcggccaagaccatcaacttcggggtcctctacggcatgtcggcccaccgcctctcccaggagctagccatcccttacgaggaggcccaggccttcattgagcgctactttcagagcttccccaaggtgcgggcctggattgagaagaccctggaggagggcaggaggcgggggtacgtggagaccctcttcggccgccgccgctacgtgccaaaactagaggcccgggtgaagagcgtgcgggaggcggccgagcgcatggccttcaacatgcccgtccagggcaccgccgccgacctcatgaagctggctatggtgaagctcttccccaggctggaggaaatgggggccaggatgctccttcaggtccacgacgagctggtcctcgaggccccaaaagagagggcggaggccgtggcccggctggccaaggaggtcatggagggggtgtatcccctggccgtgcccctggaggtggaggtggggataggggaggactggctctccgccaaggagtgataccaccccatgctggcccaagccagcatgggggccccggcaaaaggtttctggggaagttaccaggcatggtgggccgaaggaaacaggaaacaagggtatgagggttttttgccctaaagaaaggccagggggtcctcccgaaggaaggcttccagggggataccccctgggcccaggagtagcccctttcctccaaaggcctgggtgaaggcttttagccctttggtcctttgggaaggggcgcttttgacctccaaagccagaaggcgccttcccttcttcaagacgaagtcaacctcctggtccctttcccgccagtagtacacctcaaagcccccgtgggggccgtgggccagaaggtgggcgcccacggcggtttccacgagccgccccatgagggcggcgtccgcccacacctcctttggggaaagccccaagaccgccgtgatgagccccgtattaagggccaggagcttggggctcgaggcgcggcgccggaagggctcggcggcgtacttctgcag

SEQ ID NO: 3269 - DNA, 3026 bp, Artificial Sequence
  Description of Artificial Sequence: Synthetic DNA sequence of Thermus aquaticus DNA Polymerase D732E
atgagggggatgctgcccctctttgagcccaagggccgggtcctcctggtggacggccaccacctggcctaccgcaccttccacgccctgaagggcctcaccaccagccggggggagccggtgcaggcggtctacggcttcgccaagagcctcctcaaggccctcaaggaggacggggacgcggtgatcgtggtctttgacgccaaggccccctccttccgccacgaggcctacggggggtacaaggcgggccgggcccccacgccggaggactttccccggcaactcgccctcatcaaggagctggtggacctcctggggctggcgcgcctcgaggtcccgggctacgaggcggacgacgtcctggccagcctggccaagaaggcggaaaaggagggctacgaggtccgcatcctcaccgccgacaaagacctttaccagctcctttccgaccgcatccacgccctccaccccgaggggtacctcatcaccccggcctggctttgggaaaagtacggcctgaggcccgaccagtgggccgactaccgggccctgaccggggacgagtccgacaaccttcccggggtcaagggcatcggggagaagacggcgaggaagcttctggaggagtgggggagcctggaagccctcctcaagaacctggaccggctgaagcccgccatccgggagaagatcctggcccacatggacgatctgaagctctcctgggacctggccaaggtgcgcaccgacctgcccctggaggtggacttcgccaaaaggcgggagcccgaccgggagaggcttagggcctttctggagaggcttgagtttggcagcctcctccacgagttcggccttctggaaagccccaaggccctggaggaggccccctggcccccgccggaaggggccttcgtgggctttgtgctttcccgcaaggagcccatgtgggccgatcttctggccctggccgccgccagggggggccgggtccaccgggcccccgagccttataaagccctcagggacctgaaggaggcgcgggggcttctcgccaaagacctgagcgttctggccctgagggaaggccttggcctcccgcccggcgacgaccccatgctcctcgcctacctcctggacccttccaacaccacccccgagggggtggcccggcgctacggcggggagtggacggaggaggcgggggagcgggccgccctttccgagaggctcttcgccaacctgtgggggaggcttgagggggaggagaggctcctttggctttaccgggaggtggagaggcccctttccgctgtcctggcccacatggaggccacgggggtgcgcctggacgtggcctatctcagggccttgtccctggaggtggccgaggagatcgcccgcctcgaggccgaggtcttccgcctggccggccaccccttcaacctcaactcccgggaccagctggaaagggtcctctttgacgagctagggcttcccgccatcggcaagacggagaagaccggcaagcgctccaccagcgccgccgtcctggaggccctccgcgaggcccaccccatcgtggagaagatcctgcagtaccgggagctcaccaagctgaagagcacctacattgaccccttgccggacctcatccaccccaggacgggccgcctccacacccgcttcaaccagacggccacggccacgggcaggctaagtagctccgatcccaacctccagaacatccccgtccgcaccccgcttgggcagaggatccgccgggccttcatcgccgaggaggggtggctattggtggccctggactatagccagatagagctcagggtgctggcccacctctccggcgacgagaacctgatccgggtcttccaggaggggcgggacatccacacggagaccgccagctggatgttcggcgtcccccgggaggccgtggaccccctgatgcgccgggcggccaagaccatcaacttcggggtcctctacggcatgtcggcccaccgcctctcccaggagctagccatcccttacgaggaggcccaggccttcattgagcgctactttcagagcttccccaaggtgcgggcctggattgagaagaccctggaggagggcaggaggcgggggtacgtggagaccctcttcggccgccgccgctacgtgccagaactagaggcccgggtgaagagcgtgcgggaggcggccgagcgcatggccttcaacatgcccgtccagggcaccgccgccgacctcatgaagctggctatggtgaagctcttccccaggctggaggaaatgggggccaggatgctccttcaggtccacgacgagctggtcctcgaggccccaaaagagagggcggaggccgtggcccggctggccaaggaggtcatggagggggtgtatcccctggccgtgcccctggaggtggaggtggggataggggaggactggctctccgccaaggagtgataccaccccatgctggcccaagccagcatgggggccccggcaaaaggtttctggggaagttaccaggcatggtgggccgaaggaaacaggaaacaagggtatgagggttttttgccctaaagaaaggccagggggtcctcccgaaggaaggcttccagggggataccccctgggcccaggagtagcccctttcctccaaaggcctgggtgaaggcttttagccctttggtcctttgggaaggggcgcttttgacctccaaagccagaaggcgccttcccttcttcaagacgaagtcaacctcctggtccctttcccgccagtagtacacctcaaagcccccgtgggggccgtgggccagaaggtgggcgcccacggcggtttccacgagccgccccatgagggcggcgtccgcccacacctcctttggggaaagccccaagaccgccgtgatgagccccgtattaagggccaggagcttggggctcgaggcgcggcgccggaagggctcggcggcgtacttctgcag

SEQ ID NO: 3270 - DNA, 3026 bp, Artificial Sequence
  Description of Artificial Sequence: Synthetic DNA sequence of Thermus aquaticus DNA Polymerase D732F
atgagggggatgctgcccctctttgagcccaagggccgggtcctcctggtggacggccaccacctggcctaccgcaccttccacgccctgaagggcctcaccaccagccggggggagccggtgcaggcggtctacggcttcgccaagagcctcctcaaggccctcaaggaggacggggacgcggtgatcgtggtctttgacgccaaggccccctccttccgccacgaggcctacggggggtacaaggcgggccgggcccccacgccggaggactttccccggcaactcgccctcatcaaggagctggtggacctcctggggctggcgcgcctcgaggtcccgggctacgaggcggacgacgtcctggccagcctggccaagaaggcggaaaaggagggctacgaggtccgcatcctcaccgccgacaaagacctttaccagctcctttccgaccgcatccacgccctccaccccgaggggtacctcatcaccccggcctggctttgggaaaagtacggcctgaggcccgaccagtgggccgactaccgggccctgaccggggacgagtccgacaaccttcccggggtcaagggcatcggggagaagacggcgaggaagcttctggaggagtgggggagcctggaagccctcctcaagaacctggaccggctgaagcccgccatccgggagaagatcctggcccacatggacgatctgaagctctcctgggacctggccaaggtgcgcaccgacctgcccctggaggtggacttcgccaaaaggcgggagcccgaccgggagaggcttagggcctttctggagaggcttgagtttggcagcctcctccacgagttcggccttctggaaagccccaaggccctggaggaggccccctggcccccgccggaaggggccttcgtgggctttgtgctttcccgcaaggagcccatgtgggccgatcttctggccctggccgccgccagggggggccgggtccaccgggcccccgagccttataaagccctcagggacctgaaggaggcgcgggggcttctcgccaaagacctgagcgttctggccctgagggaaggccttggcctcccgcccggcgacgaccccatgctcctcgcctacctcctggacccttccaacaccacccccgagggggtggcccggcgctacggcggggagtggacggaggaggcgggggagcgggccgccctttccgagaggctcttcgccaacctgtgggggaggcttgagggggaggagaggctcctttggctttaccgggaggtggagaggcccctttccgctgtcctggcccacatggaggccacgggggtgcgcctggacgtggcctatctcagggccttgtccctggaggtggccgaggagatcgcccgcctcgaggccgaggtcttccgcctggccggccaccccttcaacctcaactcccgggaccagctggaaagggtcctctttgacgagctagggcttcccgccatcggcaagacggagaagaccggcaagcgctccaccagcgccgccgtcctggaggccctccgcgaggcccaccccatcgtggagaagatcctgcagtaccgggagctcaccaagctgaagagcacctacattgaccccttgccggacctcatccaccccaggacgggccgcctccacacccgcttcaaccagacggccacggccacgggcaggctaagtagctccgatcccaacctccagaacatccccgtccgcaccccgcttgggcagaggatccgccgggccttcatcgccgaggaggggtggctattggtggccctggactatagccagatagagctcagggtgctggcccacctctccggcgacgagaacctgatccgggtcttccaggaggggcgggacatccacacggagaccgccagctggatgttcggcgtcccccgggaggccgtggaccccctgatgcgccgggcggccaagaccatcaacttcggggtcctctacggcatgtcggcccaccgcctctcccaggagctagccatcccttacgaggaggcccaggccttcattgagcgctactttcagagcttccccaaggtgcgggcctggattgagaagaccctggaggagggcaggaggcgggggtacgtggagaccctcttcggccgccgccgctacgtgccatttctagaggcccgggtgaagagcgtgcgggaggcggccgagcgcatggccttcaacatgcccgtccagggcaccgccgccgacctcatgaagctggctatggtgaagctcttccccaggctggaggaaatgggggccaggatgctccttcaggtccacgacgagctggtcctcgaggccccaaaagagagggcggaggccgtggcccggctggccaaggaggtcatggagggggtgtatcccctggccgtgcccctggaggtggaggtggggataggggaggactggctctccgccaaggagtgataccaccccatgctggcccaagccagcatgggggccccggcaaaaggtttctggggaagttaccaggcatggtgggccgaaggaaacaggaaacaagggtatgagggttttttgccctaaagaaaggccagggggtcctcccgaaggaaggcttccagggggataccccctgggcccaggagtagcccctttcctccaaaggcctgggtgaaggcttttagccctttggtcctttgggaaggggcgcttttgacctccaaagccagaaggcgccttcccttcttcaagacgaagtcaacctcctggtccctttcccgccagtagtacacctcaaagcccccgtgggggccgtgggccagaaggtgggcgcccacggcggtttccacgagccgccccatgagggcggcgtccgcccacacctcctttggggaaagccccaagaccgccgtgatgagccccgtattaagggccaggagcttggggctcgaggcgcggcgccggaagggctcggcggcgtacttctgcag

SEQ ID NO: 3271 - DNA, 3026 bp, Artificial Sequence
  Description of Artificial Sequence: Synthetic DNA sequence of Thermus aquaticus DNA Polymerase D732S
atgagggggatgctgcccctctttgagcccaagggccgggtcctcctggtggacggccaccacctggcctaccgcaccttccacgccctgaagggcctcaccaccagccggggggagccggtgcaggcggtctacggcttcgccaagagcctcctcaaggccctcaaggaggacggggacgcggtgatcgtggtctttgacgccaaggccccctccttccgccacgaggcctacggggggtacaaggcgggccgggcccccacgccggaggactttccccggcaactcgccctcatcaaggagctggtggacctcctggggctggcgcgcctcgaggtcccgggctacgaggcggacgacgtcctggccagcctggccaagaaggcggaaaaggagggctacgaggtccgcatcctcaccgccgacaaagacctttaccagctcctttccgaccgcatccacgccctccaccccgaggggtacctcatcaccccggcctggctttgggaaaagtacggcctgaggcccgaccagtgggccgactaccgggccctgaccggggacgagtccgacaaccttcccggggtcaagggcatcggggagaagacggcgaggaagcttctggaggagtgggggagcctggaagccctcctcaagaacctggaccggctgaagcccgccatccgggagaagatcctggcccacatggacgatctgaagctctcctgggacctggccaaggtgcgcaccgacctgcccctggaggtggacttcgccaaaaggcgggagcccgaccgggagaggcttagggcctttctggagaggcttgagtttggcagcctcctccacgagttcggccttctggaaagccccaaggccctggaggaggccccctggcccccgccggaaggggccttcgtgggctttgtgctttcccgcaaggagcccatgtgggccgatcttctggccctggccgccgccagggggggccgggtccaccgggcccccgagccttataaagccctcagggacctgaaggaggcgcgggggcttctcgccaaagacctgagcgttctggccctgagggaaggccttggcctcccgcccggcgacgaccccatgctcctcgcctacctcctggacccttccaacaccacccccgagggggtggcccggcgctacggcggggagtggacggaggaggcgggggagcgggccgccctttccgagaggctcttcgccaacctgtgggggaggcttgagggggaggagaggctcctttggctttaccgggaggtggagaggcccctttccgctgtcctggcccacatggaggccacgggggtgcgcctggacgtggcctatctcagggccttgtccctggaggtggccgaggagatcgcccgcctcgaggccgaggtcttccgcctggccggccaccccttcaacctcaactcccgggaccagctggaaagggtcctctttgacgagctagggcttcccgccatcggcaagacggagaagaccggcaagcgctccaccagcgccgccgtcctggaggccctccgcgaggcccaccccatcgtggagaagatcctgcagtaccgggagctcaccaagctgaagagcacctacattgaccccttgccggacctcatccaccccaggacgggccgcctccacacccgcttcaaccagacggccacggccacgggcaggctaagtagctccgatcccaacctccagaacatccccgtccgcaccccgcttgggcagaggatccgccgggccttcatcgccgaggaggggtggctattggtggccctggactatagccagatagagctcagggtgctggcccacctctccggcgacgagaacctgatccgggtcttccaggaggggcgggacatccacacggagaccgccagctggatgttcggcgtcccccgggaggccgtggaccccctgatgcgccgggcggccaagaccatcaacttcggggtcctctacggcatgtcggcccaccgcctctcccaggagctagccatcccttacgaggaggcccaggccttcattgagcgctactttcagagcttccccaaggtgcgggcctggattgagaagaccctggaggagggcaggaggcgggggtacgtggagaccctcttcggccgccgccgctacgtgccatctctagaggcccgggtgaagagcgtgcgggaggcggccgagcgcatggccttcaacatgcccgtccagggcaccgccgccgacctcatgaagctggctatggtgaagctcttccccaggctggaggaaatgggggccaggatgctccttcaggtccacgacgagctggtcctcgaggccccaaaagagagggcggaggccgtggcccggctggccaaggaggtcatggagggggtgtatcccctggccgtgcccctggaggtggaggtggggataggggaggactggctctccgccaaggagtgataccaccccatgctggcccaagccagcatgggggccccggcaaaaggtttctggggaagttaccaggcatggtgggccgaaggaaacaggaaacaagggtatgagggttttttgccctaaagaaaggccagggggtcctcccgaaggaaggcttccagggggataccccctgggcccaggagtagcccctttcctccaaaggcctgggtgaaggcttttagccctttggtcctttgggaaggggcgcttttgacctccaaagccagaaggcgccttcccttcttcaagacgaagtcaacctcctggtccctttcccgccagtagtacacctcaaagcccccgtgggggccgtgggccagaaggtgggcgcccacggcggtttccacgagccgccccatgagggcggcgtccgcccacacctcctttggggaaagccccaagaccgccgtgatgagccccgtattaagggccaggagcttggggctcgaggcgcggcgccggaagggctcggcggcgtacttctgcag

SEQ ID NO: 3272 - DNA, 3026 bp, Artificial Sequence
  Description of Artificial Sequence: Synthetic DNA sequence of Thermus aquaticus DNA Polymerase D732Y
atgagggggatgctgcccctctttgagcccaagggccgggtcctcctggtggacggccaccacctggcctaccgcaccttccacgccctgaagggcctcaccaccagccggggggagccggtgcaggcggtctacggcttcgccaagagcctcctcaaggccctcaaggaggacggggacgcggtgatcgtggtctttgacgccaaggccccctccttccgccacgaggcctacggggggtacaaggcgggccgggcccccacgccggaggactttccccggcaactcgccctcatcaaggagctggtggacctcctggggctggcgcgcctcgaggtcccgggctacgaggcggacgacgtcctggccagcctggccaagaaggcggaaaaggagggctacgaggtccgcatcctcaccgccgacaaagacctttaccagctcctttccgaccgcatccacgccctccaccccgaggggtacctcatcaccccggcctggctttgggaaaagtacggcctgaggcccgaccagtgggccgactaccgggccctgaccggggacgagtccgacaaccttcccggggtcaagggcatcggggagaagacggcgaggaagcttctggaggagtgggggagcctggaagccctcctcaagaacctggaccggctgaagcccgccatccgggagaagatcctggcccacatggacgatctgaagctctcctgggacctggccaaggtgcgcaccgacctgcccctggaggtggacttcgccaaaaggcgggagcccgaccgggagaggcttagggcctttctggagaggcttgagtttggcagcctcctccacgagttcggccttctggaaagccccaaggccctggaggaggccccctggcccccgccggaaggggccttcgtgggctttgtgctttcccgcaaggagcccatgtgggccgatcttctggccctggccgccgccagggggggccgggtccaccgggcccccgagccttataaagccctcagggacctgaaggaggcgcgggggcttctcgccaaagacctgagcgttctggccctgagggaaggccttggcctcccgcccggcgacgaccccatgctcctcgcctacctcctggacccttccaacaccacccccgagggggtggcccggcgctacggcggggagtggacggaggaggcgggggagcgggccgccctttccgagaggctcttcgccaacctgtgggggaggcttgagggggaggagaggctcctttggctttaccgggaggtggagaggcccctttccgctgtcctggcccacatggaggccacgggggtgcgcctggacgtggcctatctcagggccttgtccctggaggtggccgaggagatcgcccgcctcgaggccgaggtcttccgcctggccggccaccccttcaacctcaactcccgggaccagctggaaagggtcctctttgacgagctagggcttcccgccatcggcaagacggagaagaccggcaagcgctccaccagcgccgccgtcctggaggccctccgcgaggcccaccccatcgtggagaagatcctgcagtaccgggagctcaccaagctgaagagcacctacattgaccccttgccggacctcatccaccccaggacgggccgcctccacacccgcttcaaccagacggccacggccacgggcaggctaagtagctccgatcccaacctccagaacatccccgtccgcaccccgcttgggcagaggatccgccgggccttcatcgccgaggaggggtggctattggtggccctggactatagccagatagagctcagggtgctggcccacctctccggcgacgagaacctgatccgggtcttccaggaggggcgggacatccacacggagaccgccagctggatgttcggcgtcccccgggaggccgtggaccccctgatgcgccgggcggccaagaccatcaacttcggggtcctctacggcatgtcggcccaccgcctctcccaggagctagccatcccttacgaggaggcccaggccttcattgagcgctactttcagagcttccccaaggtgcgggcctggattgagaagaccctggaggagggcaggaggcgggggtacgtggagaccctcttcggccgccgccgctacgtgccatatctagaggcccgggtgaagagcgtgcgggaggcggccgagcgcatggccttcaacatgcccgtccagggcaccgccgccgacctcatgaagctggctatggtgaagctcttccccaggctggaggaaatgggggccaggatgctccttcaggtccacgacgagctggtcctcgaggccccaaaagagagggcggaggccgtggcccggctggccaaggaggtcatggagggggtgtatcccctggccgtgcccctggaggtggaggtggggataggggaggactggctctccgccaaggagtgataccaccccatgctggcccaagccagcatgggggccccggcaaaaggtttctggggaagttaccaggcatggtgggccgaaggaaacaggaaacaagggtatgagggttttttgccctaaagaaaggccagggggtcctcccgaaggaaggcttccagggggataccccctgggcccaggagtagcccctttcctccaaaggcctgggtgaaggcttttagccctttggtcctttgggaaggggcgcttttgacctccaaagccagaaggcgccttcccttcttcaagacgaagtcaacctcctggtccctttcccgccagtagtacacctcaaagcccccgtgggggccgtgggccagaaggtgggcgcccacggcggtttccacgagccgccccatgagggcggcgtccgcccacacctcctttggggaaagccccaagaccgccgtgatgagccccgtattaagggccaggagcttggggctcgaggcgcggcgccggaagggctcggcggcgtacttctgcag

SEQ ID NO: 3273 - DNA, 3026 bp, Artificial Sequence
  Description of Artificial Sequence: Synthetic DNA sequence of Thermus aquaticus DNA Polymerase D732W
atgagggggatgctgcccctctttgagcccaagggccgggtcctcctggtggacggccaccacctggcctaccgcaccttccacgccctgaagggcctcaccaccagccggggggagccggtgcaggcggtctacggcttcgccaagagcctcctcaaggccctcaaggaggacggggacgcggtgatcgtggtctttgacgccaaggccccctccttccgccacgaggcctacggggggtacaaggcgggccgggcccccacgccggaggactttccccggcaactcgccctcatcaaggagctggtggacctcctggggctggcgcgcctcgaggtcccgggctacgaggcggacgacgtcctggccagcctggccaagaaggcggaaaaggagggctacgaggtccgcatcctcaccgccgacaaagacctttaccagctcctttccgaccgcatccacgccctccaccccgaggggtacctcatcaccccggcctggctttgggaaaagtacggcctgaggcccgaccagtgggccgactaccgggccctgaccggggacgagtccgacaaccttcccggggtcaagggcatcggggagaagacggcgaggaagcttctggaggagtgggggagcctggaagccctcctcaagaacctggaccggctgaagcccgccatccgggagaagatcctggcccacatggacgatctgaagctctcctgggacctggccaaggtgcgcaccgacctgcccctggaggtggacttcgccaaaaggcgggagcccgaccgggagaggcttagggcctttctggagaggcttgagtttggcagcctcctccacgagttcggccttctggaaagccccaaggccctggaggaggccccctggcccccgccggaaggggccttcgtgggctttgtgctttcccgcaaggagcccatgtgggccgatcttctggccctggccgccgccagggggggccgggtccaccgggcccccgagccttataaagccctcagggacctgaaggaggcgcgggggcttctcgccaaagacctgagcgttctggccctgagggaaggccttggcctcccgcccggcgacgaccccatgctcctcgcctacctcctggacccttccaacaccacccccgagggggtggcccggcgctacggcggggagtggacggaggaggcgggggagcgggccgccctttccgagaggctcttcgccaacctgtgggggaggcttgagggggaggagaggctcctttggctttaccgggaggtggagaggcccctttccgctgtcctggcccacatggaggccacgggggtgcgcctggacgtggcctatctcagggccttgtccctggaggtggccgaggagatcgcccgcctcgaggccgaggtcttccgcctggccggccaccccttcaacctcaactcccgggaccagctggaaagggtcctctttgacgagctagggcttcccgccatcggcaagacggagaagaccggcaagcgctccaccagcgccgccgtcctggaggccctccgcgaggcccaccccatcgtggagaagatcctgcagtaccgggagctcaccaagctgaagagcacctacattgaccccttgccggacctcatccaccccaggacgggccgcctccacacccgcttcaaccagacggccacggccacgggcaggctaagtagctccgatcccaacctccagaacatccccgtccgcaccccgcttgggcagaggatccgccgggccttcatcgccgaggaggggtggctattggtggccctggactatagccagatagagctcagggtgctggcccacctctccggcgacgagaacctgatccgggtcttccaggaggggcgggacatccacacggagaccgccagctggatgttcggcgtcccccgggaggccgtggaccccctgatgcgccgggcggccaagaccatcaacttcggggtcctctacggcatgtcggcccaccgcctctcccaggagctagccatcccttacgaggaggcccaggccttcattgagcgctactttcagagcttccccaaggtgcgggcctggattgagaagaccctggaggagggcaggaggcgggggtacgtggagaccctcttcggccgccgccgctacgtgccatggctagaggcccgggtgaagagcgtgcgggaggcggccgagcgcatggccttcaacatgcccgtccagggcaccgccgccgacctcatgaagctggctatggtgaagctcttccccaggctggaggaaatgggggccaggatgctccttcaggtccacgacgagctggtcctcgaggccccaaaagagagggcggaggccgtggcccggctggccaaggaggtcatggagggggtgtatcccctggccgtgcccctggaggtggaggtggggataggggaggactggctctccgccaaggagtgataccaccccatgctggcccaagccagcatgggggccccggcaaaaggtttctggggaagttaccaggcatggtgggccgaaggaaacaggaaacaagggtatgagggttttttgccctaaagaaaggccagggggtcctcccgaaggaaggcttccagggggataccccctgggcccaggagtagcccctttcctccaaaggcctgggtgaaggcttttagccctttggtcctttgggaaggggcgcttttgacctccaaagccagaaggcgccttcccttcttcaagacgaagtcaacctcctggtccctttcccgccagtagtacacctcaaagcccccgtgggggccgtgggccagaaggtgggcgcccacggcggtttccacgagccgccccatgagggcggcgtccgcccacacctcctttggggaaagccccaagaccgccgtgatgagccccgtattaagggccaggagcttggggctcgaggcgcggcgccggaagggctcggcggcgtacttctgcag

SEQ ID NO: 3274 - DNA, 3026 bp, Artificial Sequence
  Description of Artificial Sequence: Synthetic DNA sequence of Thermus aquaticus DNA Polymerase D732P
atgagggggatgctgcccctctttgagcccaagggccgggtcctcctggtggacggccaccacctggcctaccgcaccttccacgccctgaagggcctcaccaccagccggggggagccggtgcaggcggtctacggcttcgccaagagcctcctcaaggccctcaaggaggacggggacgcggtgatcgtggtctttgacgccaaggccccctccttccgccacgaggcctacggggggtacaaggcgggccgggcccccacgccggaggactttccccggcaactcgccctcatcaaggagctggtggacctcctggggctggcgcgcctcgaggtcccgggctacgaggcggacgacgtcctggccagcctggccaagaaggcggaaaaggagggctacgaggtccgcatcctcaccgccgacaaagacctttaccagctcctttccgaccgcatccacgccctccaccccgaggggtacctcatcaccccggcctggctttgggaaaagtacggcctgaggcccgaccagtgggccgactaccgggccctgaccggggacgagtccgacaaccttcccggggtcaagggcatcggggagaagacggcgaggaagcttctggaggagtgggggagcctggaagccctcctcaagaacctggaccggctgaagcccgccatccgggagaagatcctggcccacatggacgatctgaagctctcctgggacctggccaaggtgcgcaccgacctgcccctggaggtggacttcgccaaaaggcgggagcccgaccgggagaggcttagggcctttctggagaggcttgagtttggcagcctcctccacgagttcggccttctggaaagccccaaggccctggaggaggccccctggcccccgccggaaggggccttcgtgggctttgtgctttcccgcaaggagcccatgtgggccgatcttctggccctggccgccgccagggggggccgggtccaccgggcccccgagccttataaagccctcagggacctgaaggaggcgcgggggcttctcgccaaagacctgagcgttctggccctgagggaaggccttggcctcccgcccggcgacgaccccatgctcctcgcctacctcctggacccttccaacaccacccccgagggggtggcccggcgctacggcggggagtggacggaggaggcgggggagcgggccgccctttccgagaggctcttcgccaacctgtgggggaggcttgagggggaggagaggctcctttggctttaccgggaggtggagaggcccctttccgctgtcctggcccacatggaggccacgggggtgcgcctggacgtggcctatctcagggccttgtccctggaggtggccgaggagatcgcccgcctcgaggccgaggtcttccgcctggccggccaccccttcaacctcaactcccgggaccagctggaaagggtcctctttgacgagctagggcttcccgccatcggcaagacggagaagaccggcaagcgctccaccagcgccgccgtcctggaggccctccgcgaggcccaccccatcgtggagaagatcctgcagtaccgggagctcaccaagctgaagagcacctacattgaccccttgccggacctcatccaccccaggacgggccgcctccacacccgcttcaaccagacggccacggccacgggcaggctaagtagctccgatcccaacctccagaacatccccgtccgcaccccgcttgggcagaggatccgccgggccttcatcgccgaggaggggtggctattggtggccctggactatagccagatagagctcagggtgctggcccacctctccggcgacgagaacctgatccgggtcttccaggaggggcgggacatccacacggagaccgccagctggatgttcggcgtcccccgggaggccgtggaccccctgatgcgccgggcggccaagaccatcaacttcggggtcctctacggcatgtcggcccaccgcctctcccaggagctagccatcccttacgaggaggcccaggccttcattgagcgctactttcagagcttccccaaggtgcgggcctggattgagaagaccctggaggagggcaggaggcgggggtacgtggagaccctcttcggccgccgccgctacgtgccacctctagaggcccgggtgaagagcgtgcgggaggcggccgagcgcatggccttcaacatgcccgtccagggcaccgccgccgacctcatgaagctggctatggtgaagctcttccccaggctggaggaaatgggggccaggatgctccttcaggtccacgacgagctggtcctcgaggccccaaaagagagggcggaggccgtggcccggctggccaaggaggtcatggagggggtgtatcccctggccgtgcccctggaggtggaggtggggataggggaggactggctctccgccaaggagtgataccaccccatgctggcccaagccagcatgggggccccggcaaaaggtttctggggaagttaccaggcatggtgggccgaaggaaacaggaaacaagggtatgagggttttttgccctaaagaaaggccagggggtcctcccgaaggaaggcttccagggggataccccctgggcccaggagtagcccctttcctccaaaggcctgggtgaaggcttttagccctttggtcctttgggaaggggcgcttttgacctccaaagccagaaggcgccttcccttcttcaagacgaagtcaacctcctggtccctttcccgccagtagtacacctcaaagcccccgtgggggccgtgggccagaaggtgggcgcccacggcggtttccacgagccgccccatgagggcggcgtccgcccacacctcctttggggaaagccccaagaccgccgtgatgagccccgtattaagggccaggagcttggggctcgaggcgcggcgccggaagggctcggcggcgtacttctgcag

SEQ ID NO: 3275 - DNA, 3026 bp, Artificial Sequence
  Description of Artificial Sequence: Synthetic DNA sequence of Thermus aquaticus DNA Polymerase D732M
atgagggggatgctgcccctctttgagcccaagggccgggtcctcctggtggacggccaccacctggcctaccgcaccttccacgccctgaagggcctcaccaccagccggggggagccggtgcaggcggtctacggcttcgccaagagcctcctcaaggccctcaaggaggacggggacgcggtgatcgtggtctttgacgccaaggccccctccttccgccacgaggcctacggggggtacaaggcgggccgggcccccacgccggaggactttccccggcaactcgccctcatcaaggagctggtggacctcctggggctggcgcgcctcgaggtcccgggctacgaggcggacgacgtcctggccagcctggccaagaaggcggaaaaggagggctacgaggtccgcatcctcaccgccgacaaagacctttaccagctcctttccgaccgcatccacgccctccaccccgaggggtacctcatcaccccggcctggctttgggaaaagtacggcctgaggcccgaccagtgggccgactaccgggccctgaccggggacgagtccgacaaccttcccggggtcaagggcatcggggagaagacggcgaggaagcttctggaggagtgggggagcctggaagccctcctcaagaacctggaccggctgaagcccgccatccgggagaagatcctggcccacatggacgatctgaagctctcctgggacctggccaaggtgcgcaccgacctgcccctggaggtggacttcgccaaaaggcgggagcccgaccgggagaggcttagggcctttctggagaggcttgagtttggcagcctcctccacgagttcggccttctggaaagccccaaggccctggaggaggccccctggcccccgccggaaggggccttcgtgggctttgtgctttcccgcaaggagcccatgtgggccgatcttctggccctggccgccgccagggggggccgggtccaccgggcccccgagccttataaagccctcagggacctgaaggaggcgcgggggcttctcgccaaagacctgagcgttctggccctgagggaaggccttggcctcccgcccggcgacgaccccatgctcctcgcctacctcctggacccttccaacaccacccccgagggggtggcccggcgctacggcggggagtggacggaggaggcgggggagcgggccgccctttccgagaggctcttcgccaacctgtgggggaggcttgagggggaggagaggctcctttggctttaccgggaggtggagaggcccctttccgctgtcctggcccacatggaggccacgggggtgcgcctggacgtggcctatctcagggccttgtccctggaggtggccgaggagatcgcccgcctcgaggccgaggtcttccgcctggccggccaccccttcaacctcaactcccgggaccagctggaaagggtcctctttgacgagctagggcttcccgccatcggcaagacggagaagaccggcaagcgctccaccagcgccgccgtcctggaggccctccgcgaggcccaccccatcgtggagaagatcctgcagtaccgggagctcaccaagctgaagagcacctacattgaccccttgccggacctcatccaccccaggacgggccgcctccacacccgcttcaaccagacggccacggccacgggcaggctaagtagctccgatcccaacctccagaacatccccgtccgcaccccgcttgggcagaggatccgccgggccttcatcgccgaggaggggtggctattggtggccctggactatagccagatagagctcagggtgctggcccacctctccggcgacgagaacctgatccgggtcttccaggaggggcgggacatccacacggagaccgccagctggatgttcggcgtcccccgggaggccgtggaccccctgatgcgccgggcggccaagaccatcaacttcggggtcctctacggcatgtcggcccaccgcctctcccaggagctagccatcccttacgaggaggcccaggccttcattgagcgctactttcagagcttccccaaggtgcgggcctggattgagaagaccctggaggagggcaggaggcgggggtacgtggagaccctcttcggccgccgccgctacgtgccaatgctagaggcccgggtgaagagcgtgcgggaggcggccgagcgcatggccttcaacatgcccgtccagggcaccgccgccgacctcatgaagctggctatggtgaagctcttccccaggctggaggaaatgggggccaggatgctccttcaggtccacgacgagctggtcctcgaggccccaaaagagagggcggaggccgtggcccggctggccaaggaggtcatggagggggtgtatcccctggccgtgcccctggaggtggaggtggggataggggaggactggctctccgccaaggagtgataccaccccatgctggcccaagccagcatgggggccccggcaaaaggtttctggggaagttaccaggcatggtgggccgaaggaaacaggaaacaagggtatgagggttttttgccctaaagaaaggccagggggtcctcccgaaggaaggcttccagggggataccccctgggcccaggagtagcccctttcctccaaaggcctgggtgaaggcttttagccctttggtcctttgggaaggggcgcttttgacctccaaagccagaaggcgccttcccttcttcaagacgaagtcaacctcctggtccctttcccgccagtagtacacctcaaagcccccgtgggggccgtgggccagaaggtgggcgcccacggcggtttccacgagccgccccatgagggcggcgtccgcccacacctcctttggggaaagccccaagaccgccgtgatgagccccgtattaagggccaggagcttggggctcgaggcgcggcgccggaagggctcggcggcgtacttctgcag

SEQ ID NO: 3276 - DNA, 3026 bp, Artificial Sequence
  Description of Artificial Sequence: Synthetic DNA sequence of Thermus aquaticus DNA Polymerase D732T
atgagggggatgctgcccctctttgagcccaagggccgggtcctcctggtggacggccaccacctggcctaccgcaccttccacgccctgaagggcctcaccaccagccggggggagccggtgcaggcggtctacggcttcgccaagagcctcctcaaggccctcaaggaggacggggacgcggtgatcgtggtctttgacgccaaggccccctccttccgccacgaggcctacggggggtacaaggcgggccgggcccccacgccggaggactttccccggcaactcgccctcatcaaggagctggtggacctcctggggctggcgcgcctcgaggtcccgggctacgaggcggacgacgtcctggccagcctggccaagaaggcggaaaaggagggctacgaggtccgcatcctcaccgccgacaaagacctttaccagctcctttccgaccgcatccacgccctccaccccgaggggtacctcatcaccccggcctggctttgggaaaagtacggcctgaggcccgaccagtgggccgactaccgggccctgaccggggacgagtccgacaaccttcccggggtcaagggcatcggggagaagacggcgaggaagcttctggaggagtgggggagcctggaagccctcctcaagaacctggaccggctgaagcccgccatccgggagaagatcctggcccacatggacgatctgaagctctcctgggacctggccaaggtgcgcaccgacctgcccctggaggtggacttcgccaaaaggcgggagcccgaccgggagaggcttagggcctttctggagaggcttgagtttggcagcctcctccacgagttcggccttctggaaagccccaaggccctggaggaggccccctggcccccgccggaaggggccttcgtgggctttgtgctttcccgcaaggagcccatgtgggccgatcttctggccctggccgccgccagggggggccgggtccaccgggcccccgagccttataaagccctcagggacctgaaggaggcgcgggggcttctcgccaaagacctgagcgttctggccctgagggaaggccttggcctcccgcccggcgacgaccccatgctcctcgcctacctcctggacccttccaacaccacccccgagggggtggcccggcgctacggcggggagtggacggaggaggcgggggagcgggccgccctttccgagaggctcttcgccaacctgtgggggaggcttgagggggaggagaggctcctttggctttaccgggaggtggagaggcccctttccgctgtcctggcccacatggaggccacgggggtgcgcctggacgtggcctatctcagggccttgtccctggaggtggccgaggagatcgcccgcctcgaggccgaggtcttccgcctggccggccaccccttcaacctcaactcccgggaccagctggaaagggtcctctttgacgagctagggcttcccgccatcggcaagacggagaagaccggcaagcgctccaccagcgccgccgtcctggaggccctccgcgaggcccaccccatcgtggagaagatcctgcagtaccgggagctcaccaagctgaagagcacctacattgaccccttgccggacctcatccaccccaggacgggccgcctccacacccgcttcaaccagacggccacggccacgggcaggctaagtagctccgatcccaacctccagaacatccccgtccgcaccccgcttgggcagaggatccgccgggccttcatcgccgaggaggggtggctattggtggccctggactatagccagatagagctcagggtgctggcccacctctccggcgacgagaacctgatccgggtcttccaggaggggcgggacatccacacggagaccgccagctggatgttcggcgtcccccgggaggccgtggaccccctgatgcgccgggcggccaagaccatcaacttcggggtcctctacggcatgtcggcccaccgcctctcccaggagctagccatcccttacgaggaggcccaggccttcattgagcgctactttcagagcttccccaaggtgcgggcctggattgagaagaccctggaggagggcaggaggcgggggtacgtggagaccctcttcggccgccgccgctacgtgccaactctagaggcccgggtgaagagcgtgcgggaggcggccgagcgcatggccttcaacatgcccgtccagggcaccgccgccgacctcatgaagctggctatggtgaagctcttccccaggctggaggaaatgggggccaggatgctccttcaggtccacgacgagctggtcctcgaggccccaaaagagagggcggaggccgtggcccggctggccaaggaggtcatggagggggtgtatcccctggccgtgcccctggaggtggaggtggggataggggaggactggctctccgccaaggagtgataccaccccatgctggcccaagccagcatgggggccccggcaaaaggtttctggggaagttaccaggcatggtgggccgaaggaaacaggaaacaagggtatgagggttttttgccctaaagaaaggccagggggtcctcccgaaggaaggcttccagggggataccccctgggcccaggagtagcccctttcctccaaaggcctgggtgaaggcttttagccctttggtcctttgggaaggggcgcttttgacctccaaagccagaaggcgccttcccttcttcaagacgaagtcaacctcctggtccctttcccgccagtagtacacctcaaagcccccgtgggggccgtgggccagaaggtgggcgcccacggcggtttccacgagccgccccatgagggcggcgtccgcccacacctcctttggggaaagccccaagaccgccgtgatgagccccgtattaagggccaggagcttggggctcgaggcgcggcgccggaagggctcggcggcgtacttctgcag

SEQ ID NO: 3277 - DNA, 3026 bp, Artificial Sequence
  Description of Artificial Sequence: Synthetic DNA sequence of Thermus aquaticus DNA Polymerase D732N
atgagggggatgctgcccctctttgagcccaagggccgggtcctcctggtggacggccaccacctggcctaccgcaccttccacgccctgaagggcctcaccaccagccggggggagccggtgcaggcggtctacggcttcgccaagagcctcctcaaggccctcaaggaggacggggacgcggtgatcgtggtctttgacgccaaggccccctccttccgccacgaggcctacggggggtacaaggcgggccgggcccccacgccggaggactttccccggcaactcgccctcatcaaggagctggtggacctcctggggctggcgcgcctcgaggtcccgggctacgaggcggacgacgtcctggccagcctggccaagaaggcggaaaaggagggctacgaggtccgcatcctcaccgccgacaaagacctttaccagctcctttccgaccgcatccacgccctccaccccgaggggtacctcatcaccccggcctggctttgggaaaagtacggcctgaggcccgaccagtgggccgactaccgggccctgaccggggacgagtccgacaaccttcccggggtcaagggcatcggggagaagacggcgaggaagcttctggaggagtgggggagcctggaagccctcctcaagaacctggaccggctgaagcccgccatccgggagaagatcctggcccacatggacgatctgaagctctcctgggacctggccaaggtgcgcaccgacctgcccctggaggtggacttcgccaaaaggcgggagcccgaccgggagaggcttagggcctttctggagaggcttgagtttggcagcctcctccacgagttcggccttctggaaagccccaaggccctggaggaggccccctggcccccgccggaaggggccttcgtgggctttgtgctttcccgcaaggagcccatgtgggccgatcttctggccctggccgccgccagggggggccgggtccaccgggcccccgagccttataaagccctcagggacctgaaggaggcgcgggggcttctcgccaaagacctgagcgttctggccctgagggaaggccttggcctcccgcccggcgacgaccccatgctcctcgcctacctcctggacccttccaacaccacccccgagggggtggcccggcgctacggcggggagtggacggaggaggcgggggagcgggccgccctttccgagaggctcttcgccaacctgtgggggaggcttgagggggaggagaggctcctttggctttaccgggaggtggagaggcccctttccgctgtcctggcccacatggaggccacgggggtgcgcctggacgtggcctatctcagggccttgtccctggaggtggccgaggagatcgcccgcctcgaggccgaggtcttccgcctggccggccaccccttcaacctcaactcccgggaccagctggaaagggtcctctttgacgagctagggcttcccgccatcggcaagacggagaagaccggcaagcgctccaccagcgccgccgtcctggaggccctccgcgaggcccaccccatcgtggagaagatcctgcagtaccgggagctcaccaagctgaagagcacctacattgaccccttgccggacctcatccaccccaggacgggccgcctccacacccgcttcaaccagacggccacggccacgggcaggctaagtagctccgatcccaacctccagaacatccccgtccgcaccccgcttgggcagaggatccgccgggccttcatcgccgaggaggggtggctattggtggccctggactatagccagatagagctcagggtgctggcccacctctccggcgacgagaacctgatccgggtcttccaggaggggcgggacatccacacggagaccgccagctggatgttcggcgtcccccgggaggccgtggaccccctgatgcgccgggcggccaagaccatcaacttcggggtcctctacggcatgtcggcccaccgcctctcccaggagctagccatcccttacgaggaggcccaggccttcattgagcgctactttcagagcttccccaaggtgcgggcctggattgagaagaccctggaggagggcaggaggcgggggtacgtggagaccctcttcggccgccgccgctacgtgccaaatctagaggcccgggtgaagagcgtgcgggaggcggccgagcgcatggccttcaacatgcccgtccagggcaccgccgccgacctcatgaagctggctatggtgaagctcttccccaggctggaggaaatgggggccaggatgctccttcaggtccacgacgagctggtcctcgaggccccaaaagagagggcggaggccgtggcccggctggccaaggaggtcatggagggggtgtatcccctggccgtgcccctggaggtggaggtggggataggggaggactggctctccgccaaggagtgataccaccccatgctggcccaagccagcatgggggccccggcaaaaggtttctggggaagttaccaggcatggtgggccgaaggaaacaggaaacaagggtatgagggttttttgccctaaagaaaggccagggggtcctcccgaaggaaggcttccagggggataccccctgggcccaggagtagcccctttcctccaaaggcctgggtgaaggcttttagccctttggtcctttgggaaggggcgcttttgacctccaaagccagaaggcgccttcccttcttcaagacgaagtcaacctcctggtccctttcccgccagtagtacacctcaaagcccccgtgggggccgtgggccagaaggtgggcgcccacggcggtttccacgagccgccccatgagggcggcgtccgcccacacctcctttggggaaagccccaagaccgccgtgatgagccccgtattaagggccaggagcttggggctcgaggcgcggcgccggaagggctcggcggcgtacttctgcag

SEQ ID NO: 3278 - DNA, 3026 bp, Artificial Sequence
  Description of Artificial Sequence: Synthetic DNA sequence of Thermus aquaticus DNA Polymerase D732V
atgagggggatgctgcccctctttgagcccaagggccgggtcctcctggtggacggccaccacctggcctaccgcaccttccacgccctgaagggcctcaccaccagccggggggagccggtgcaggcggtctacggcttcgccaagagcctcctcaaggccctcaaggaggacggggacgcggtgatcgtggtctttgacgccaaggccccctccttccgccacgaggcctacggggggtacaaggcgggccgggcccccacgccggaggactttccccggcaactcgccctcatcaaggagctggtggacctcctggggctggcgcgcctcgaggtcccgggctacgaggcggacgacgtcctggccagcctggccaagaaggcggaaaaggagggctacgaggtccgcatcctcaccgccgacaaagacctttaccagctcctttccgaccgcatccacgccctccaccccgaggggtacctcatcaccccggcctggctttgggaaaagtacggcctgaggcccgaccagtgggccgactaccgggccctgaccggggacgagtccgacaaccttcccggggtcaagggcatcggggagaagacggcgaggaagcttctggaggagtgggggagcctggaagccctcctcaagaacctggaccggctgaagcccgccatccgggagaagatcctggcccacatggacgatctgaagctctcctgggacctggccaaggtgcgcaccgacctgcccctggaggtggacttcgccaaaaggcgggagcccgaccgggagaggcttagggcctttctggagaggcttgagtttggcagcctcctccacgagttcggccttctggaaagccccaaggccctggaggaggccccctggcccccgccggaaggggccttcgtgggctttgtgctttcccgcaaggagcccatgtgggccgatcttctggccctggccgccgccagggggggccgggtccaccgggcccccgagccttataaagccctcagggacctgaaggaggcgcgggggcttctcgccaaagacctgagcgttctggccctgagggaaggccttggcctcccgcccggcgacgaccccatgctcctcgcctacctcctggacccttccaacaccacccccgagggggtggcccggcgctacggcggggagtggacggaggaggcgggggagcgggccgccctttccgagaggctcttcgccaacctgtgggggaggcttgagggggaggagaggctcctttggctttaccgggaggtggagaggcccctttccgctgtcctggcccacatggaggccacgggggtgcgcctggacgtggcctatctcagggccttgtccctggaggtggccgaggagatcgcccgcctcgaggccgaggtcttccgcctggccggccaccccttcaacctcaactcccgggaccagctggaaagggtcctctttgacgagctagggcttcccgccatcggcaagacggagaagaccggcaagcgctccaccagcgccgccgtcctggaggccctccgcgaggcccaccccatcgtggagaagatcctgcagtaccgggagctcaccaagctgaagagcacctacattgaccccttgccggacctcatccaccccaggacgggccgcctccacacccgcttcaaccagacggccacggccacgggcaggctaagtagctccgatcccaacctccagaacatccccgtccgcaccccgcttgggcagaggatccgccgggccttcatcgccgaggaggggtggctattggtggccctggactatagccagatagagctcagggtgctggcccacctctccggcgacgagaacctgatccgggtcttccaggaggggcgggacatccacacggagaccgccagctggatgttcggcgtcccccgggaggccgtggaccccctgatgcgccgggcggccaagaccatcaacttcggggtcctctacggcatgtcggcccaccgcctctcccaggagctagccatcccttacgaggaggcccaggccttcattgagcgctactttcagagcttccccaaggtgcgggcctggattgagaagaccctggaggagggcaggaggcgggggtacgtggagaccctcttcggccgccgccgctacgtgccagtcctagaggcccgggtgaagagcgtgcgggaggcggccgagcgcatggccttcaacatgcccgtccagggcaccgccgccgacctcatgaagctggctatggtgaagctcttccccaggctggaggaaatgggggccaggatgctccttcaggtccacgacgagctggtcctcgaggccccaaaagagagggcggaggccgtggcccggctggccaaggaggtcatggagggggtgtatcccctggccgtgcccctggaggtggaggtggggataggggaggactggctctccgccaaggagtgataccaccccatgctggcccaagccagcatgggggccccggcaaaaggtttctggggaagttaccaggcatggtgggccgaaggaaacaggaaacaagggtatgagggttttttgccctaaagaaaggccagggggtcctcccgaaggaaggcttccagggggataccccctgggcccaggagtagcccctttcctccaaaggcctgggtgaaggcttttagccctttggtcctttgggaaggggcgcttttgacctccaaagccagaaggcgccttcccttcttcaagacgaagtcaacctcctggtccctttcccgccagtagtacacctcaaagcccccgtgggggccgtgggccagaaggtgggcgcccacggcggtttccacgagccgccccatgagggcggcgtccgcccacacctcctttggggaaagccccaagaccgccgtgatgagccccgtattaagggccaggagcttggggctcgaggcgcggcgccggaagggctcggcggcgtacttctgcag

SEQ ID NO: 3279 - DNA, 3026 bp, Artificial Sequence
  Description of Artificial Sequence: Synthetic DNA sequence of Thermus aquaticus DNA Polymerase L733A
atgagggggatgctgcccctctttgagcccaagggccgggtcctcctggtggacggccaccacctggcctaccgcaccttccacgccctgaagggcctcaccaccagccggggggagccggtgcaggcggtctacggcttcgccaagagcctcctcaaggccctcaaggaggacggggacgcggtgatcgtggtctttgacgccaaggccccctccttccgccacgaggcctacggggggtacaaggcgggccgggcccccacgccggaggactttccccggcaactcgccctcatcaaggagctggtggacctcctggggctggcgcgcctcgaggtcccgggctacgaggcggacgacgtcctggccagcctggccaagaaggcggaaaaggagggctacgaggtccgcatcctcaccgccgacaaagacctttaccagctcctttccgaccgcatccacgccctccaccccgaggggtacctcatcaccccggcctggctttgggaaaagtacggcctgaggcccgaccagtgggccgactaccgggccctgaccggggacgagtccgacaaccttcccggggtcaagggcatcggggagaagacggcgaggaagcttctggaggagtgggggagcctggaagccctcctcaagaacctggaccggctgaagcccgccatccgggagaagatcctggcccacatggacgatctgaagctctcctgggacctggccaaggtgcgcaccgacctgcccctggaggtggacttcgccaaaaggcgggagcccgaccgggagaggcttagggcctttctggagaggcttgagtttggcagcctcctccacgagttcggccttctggaaagccccaaggccctggaggaggccccctggcccccgccggaaggggccttcgtgggctttgtgctttcccgcaaggagcccatgtgggccgatcttctggccctggccgccgccagggggggccgggtccaccgggcccccgagccttataaagccctcagggacctgaaggaggcgcgggggcttctcgccaaagacctgagcgttctggccctgagggaaggccttggcctcccgcccggcgacgaccccatgctcctcgcctacctcctggacccttccaacaccacccccgagggggtggcccggcgctacggcggggagtggacggaggaggcgggggagcgggccgccctttccgagaggctcttcgccaacctgtgggggaggcttgagggggaggagaggctcctttggctttaccgggaggtggagaggcccctttccgctgtcctggcccacatggaggccacgggggtgcgcctggacgtggcctatctcagggccttgtccctggaggtggccgaggagatcgcccgcctcgaggccgaggtcttccgcctggccggccaccccttcaacctcaactcccgggaccagctggaaagggtcctctttgacgagctagggcttcccgccatcggcaagacggagaagaccggcaagcgctccaccagcgccgccgtcctggaggccctccgcgaggcccaccccatcgtggagaagatcctgcagtaccgggagctcaccaagctgaagagcacctacattgaccccttgccggacctcatccaccccaggacgggccgcctccacacccgcttcaaccagacggccacggccacgggcaggctaagtagctccgatcccaacctccagaacatccccgtccgcaccccgcttgggcagaggatccgccgggccttcatcgccgaggaggggtggctattggtggccctggactatagccagatagagctcagggtgctggcccacctctccggcgacgagaacctgatccgggtcttccaggaggggcgggacatccacacggagaccgccagctggatgttcggcgtcccccgggaggccgtggaccccctgatgcgccgggcggccaagaccatcaacttcggggtcctctacggcatgtcggcccaccgcctctcccaggagctagccatcccttacgaggaggcccaggccttcattgagcgctactttcagagcttccccaaggtgcgggcctggattgagaagaccctggaggagggcaggaggcgggggtacgtggagaccctcttcggccgccgccgctacgtgccagacgctgaggcccgggtgaagagcgtgcgggaggcggccgagcgcatggccttcaacatgcccgtccagggcaccgccgccgacctcatgaagctggctatggtgaagctcttccccaggctggaggaaatgggggccaggatgctccttcaggtccacgacgagctggtcctcgaggccccaaaagagagggcggaggccgtggcccggctggccaaggaggtcatggagggggtgtatcccctggccgtgcccctggaggtggaggtggggataggggaggactggctctccgccaaggagtgataccaccccatgctggcccaagccagcatgggggccccggcaaaaggtttctggggaagttaccaggcatggtgggccgaaggaaacaggaaacaagggtatgagggttttttgccctaaagaaaggccagggggtcctcccgaaggaaggcttccagggggataccccctgggcccaggagtagcccctttcctccaaaggcctgggtgaaggcttttagccctttggtcctttgggaaggggcgcttttgacctccaaagccagaaggcgccttcccttcttcaagacgaagtcaacctcctggtccctttcccgccagtagtacacctcaaagcccccgtgggggccgtgggccagaaggtgggcgcccacggcggtttccacgagccgccccatgagggcggcgtccgcccacacctcctttggggaaagccccaagaccgccgtgatgagccccgtattaagggccaggagcttggggctcgaggcgcggcgccggaagggctcggcggcgtacttctgcag

SEQ ID NO: 3280 - DNA, 3026 bp, Artificial Sequence
  Description of Artificial Sequence: Synthetic DNA sequence of Thermus aquaticus DNA Polymerase L733R
atgagggggatgctgcccctctttgagcccaagggccgggtcctcctggtggacggccaccacctggcctaccgcaccttccacgccctgaagggcctcaccaccagccggggggagccggtgcaggcggtctacggcttcgccaagagcctcctcaaggccctcaaggaggacggggacgcggtgatcgtggtctttgacgccaaggccccctccttccgccacgaggcctacggggggtacaaggcgggccgggcccccacgccggaggactttccccggcaactcgccctcatcaaggagctggtggacctcctggggctggcgcgcctcgaggtcccgggctacgaggcggacgacgtcctggccagcctggccaagaaggcggaaaaggagggctacgaggtccgcatcctcaccgccgacaaagacctttaccagctcctttccgaccgcatccacgccctccaccccgaggggtacctcatcaccccggcctggctttgggaaaagtacggcctgaggcccgaccagtgggccgactaccgggccctgaccggggacgagtccgacaaccttcccggggtcaagggcatcggggagaagacggcgaggaagcttctggaggagtgggggagcctggaagccctcctcaagaacctggaccggctgaagcccgccatccgggagaagatcctggcccacatggacgatctgaagctctcctgggacctggccaaggtgcgcaccgacctgcccctggaggtggacttcgccaaaaggcgggagcccgaccgggagaggcttagggcctttctggagaggcttgagtttggcagcctcctccacgagttcggccttctggaaagccccaaggccctggaggaggccccctggcccccgccggaaggggccttcgtgggctttgtgctttcccgcaaggagcccatgtgggccgatcttctggccctggccgccgccagggggggccgggtccaccgggcccccgagccttataaagccctcagggacctgaaggaggcgcgggggcttctcgccaaagacctgagcgttctggccctgagggaaggccttggcctcccgcccggcgacgaccccatgctcctcgcctacctcctggacccttccaacaccacccccgagggggtggcccggcgctacggcggggagtggacggaggaggcgggggagcgggccgccctttccgagaggctcttcgccaacctgtgggggaggcttgagggggaggagaggctcctttggctttaccgggaggtggagaggcccctttccgctgtcctggcccacatggaggccacgggggtgcgcctggacgtggcctatctcagggccttgtccctggaggtggccgaggagatcgcccgcctcgaggccgaggtcttccgcctggccggccaccccttcaacctcaactcccgggaccagctggaaagggtcctctttgacgagctagggcttcccgccatcggcaagacggagaagaccggcaagcgctccaccagcgccgccgtcctggaggccctccgcgaggcccaccccatcgtggagaagatcctgcagtaccgggagctcaccaagctgaagagcacctacattgaccccttgccggacctcatccaccccaggacgggccgcctccacacccgcttcaaccagacggccacggccacgggcaggctaagtagctccgatcccaacctccagaacatccccgtccgcaccccgcttgggcagaggatccgccgggccttcatcgccgaggaggggtggctattggtggccctggactatagccagatagagctcagggtgctggcccacctctccggcgacgagaacctgatccgggtcttccaggaggggcgggacatccacacggagaccgccagctggatgttcggcgtcccccgggaggccgtggaccccctgatgcgccgggcggccaagaccatcaacttcggggtcctctacggcatgtcggcccaccgcctctcccaggagctagccatcccttacgaggaggcccaggccttcattgagcgctactttcagagcttccccaaggtgcgggcctggattgagaagaccctggaggagggcaggaggcgggggtacgtggagaccctcttcggccgccgccgctacgtgccagaccgagaggcccgggtgaagagcgtgcgggaggcggccgagcgcatggccttcaacatgcccgtccagggcaccgccgccgacctcatgaagctggctatggtgaagctcttccccaggctggaggaaatgggggccaggatgctccttcaggtccacgacgagctggtcctcgaggccccaaaagagagggcggaggccgtggcccggctggccaaggaggtcatggagggggtgtatcccctggccgtgcccctggaggtggaggtggggataggggaggactggctctccgccaaggagtgataccaccccatgctggcccaagccagcatgggggccccggcaaaaggtttctggggaagttaccaggcatggtgggccgaaggaaacaggaaacaagggtatgagggttttttgccctaaagaaaggccagggggtcctcccgaaggaaggcttccagggggataccccctgggcccaggagtagcccctttcctccaaaggcctgggtgaaggcttttagccctttggtcctttgggaaggggcgcttttgacctccaaagccagaaggcgccttcccttcttcaagacgaagtcaacctcctggtccctttcccgccagtagtacacctcaaagcccccgtgggggccgtgggccagaaggtgggcgcccacggcggtttccacgagccgccccatgagggcggcgtccgcccacacctcctttggggaaagccccaagaccgccgtgatgagccccgtattaagggccaggagcttggggctcgaggcgcggcgccggaagggctcggcggcgtacttctgcag

SEQ ID NO: 3281 - DNA, 3026 bp, Artificial Sequence
  Description of Artificial Sequence: Synthetic DNA sequence of Thermus aquaticus DNA Polymerase L733C
atgagggggatgctgcccctctttgagcccaagggccgggtcctcctggtggacggccaccacctggcctaccgcaccttccacgccctgaagggcctcaccaccagccggggggagccggtgcaggcggtctacggcttcgccaagagcctcctcaaggccctcaaggaggacggggacgcggtgatcgtggtctttgacgccaaggccccctccttccgccacgaggcctacggggggtacaaggcgggccgggcccccacgccggaggactttccccggcaactcgccctcatcaaggagctggtggacctcctggggctggcgcgcctcgaggtcccgggctacgaggcggacgacgtcctggccagcctggccaagaaggcggaaaaggagggctacgaggtccgcatcctcaccgccgacaaagacctttaccagctcctttccgaccgcatccacgccctccaccccgaggggtacctcatcaccccggcctggctttgggaaaagtacggcctgaggcccgaccagtgggccgactaccgggccctgaccggggacgagtccgacaaccttcccggggtcaagggcatcggggagaagacggcgaggaagcttctggaggagtgggggagcctggaagccctcctcaagaacctggaccggctgaagcccgccatccgggagaagatcctggcccacatggacgatctgaagctctcctgggacctggccaaggtgcgcaccgacctgcccctggaggtggacttcgccaaaaggcgggagcccgaccgggagaggcttagggcctttctggagaggcttgagtttggcagcctcctccacgagttcggccttctggaaagccccaaggccctggaggaggccccctggcccccgccggaaggggccttcgtgggctttgtgctttcccgcaaggagcccatgtgggccgatcttctggccctggccgccgccagggggggccgggtccaccgggcccccgagccttataaagccctcagggacctgaaggaggcgcgggggcttctcgccaaagacctgagcgttctggccctgagggaaggccttggcctcccgcccggcgacgaccccatgctcctcgcctacctcctggacccttccaacaccacccccgagggggtggcccggcgctacggcggggagtggacggaggaggcgggggagcgggccgccctttccgagaggctcttcgccaacctgtgggggaggcttgagggggaggagaggctcctttggctttaccgggaggtggagaggcccctttccgctgtcctggcccacatggaggccacgggggtgcgcctggacgtggcctatctcagggccttgtccctggaggtggccgaggagatcgcccgcctcgaggccgaggtcttccgcctggccggccaccccttcaacctcaactcccgggaccagctggaaagggtcctctttgacgagctagggcttcccgccatcggcaagacggagaagaccggcaagcgctccaccagcgccgccgtcctggaggccctccgcgaggcccaccccatcgtggagaagatcctgcagtaccgggagctcaccaagctgaagagcacctacattgaccccttgccggacctcatccaccccaggacgggccgcctccacacccgcttcaaccagacggccacggccacgggcaggctaagtagctccgatcccaacctccagaacatccccgtccgcaccccgcttgggcagaggatccgccgggccttcatcgccgaggaggggtggctattggtggccctggactatagccagatagagctcagggtgctggcccacctctccggcgacgagaacctgatccgggtcttccaggaggggcgggacatccacacggagaccgccagctggatgttcggcgtcccccgggaggccgtggaccccctgatgcgccgggcggccaagaccatcaacttcggggtcctctacggcatgtcggcccaccgcctctcccaggagctagccatcccttacgaggaggcccaggccttcattgagcgctactttcagagcttccccaaggtgcgggcctggattgagaagaccctggaggagggcaggaggcgggggtacgtggagaccctcttcggccgccgccgctacgtgccagactgtgaggcccgggtgaagagcgtgcgggaggcggccgagcgcatggccttcaacatgcccgtccagggcaccgccgccgacctcatgaagctggctatggtgaagctcttccccaggctggaggaaatgggggccaggatgctccttcaggtccacgacgagctggtcctcgaggccccaaaagagagggcggaggccgtggcccggctggccaaggaggtcatggagggggtgtatcccctggccgtgcccctggaggtggaggtggggataggggaggactggctctccgccaaggagtgataccaccccatgctggcccaagccagcatgggggccccggcaaaaggtttctggggaagttaccaggcatggtgggccgaaggaaacaggaaacaagggtatgagggttttttgccctaaagaaaggccagggggtcctcccgaaggaaggcttccagggggataccccctgggcccaggagtagcccctttcctccaaaggcctgggtgaaggcttttagccctttggtcctttgggaaggggcgcttttgacctccaaagccagaaggcgccttcccttcttcaagacgaagtcaacctcctggtccctttcccgccagtagtacacctcaaagcccccgtgggggccgtgggccagaaggtgggcgcccacggcggtttccacgagccgccccatgagggcggcgtccgcccacacctcctttggggaaagccccaagaccgccgtgatgagccccgtattaagggccaggagcttggggctcgaggcgcggcgccggaagggctcggcggcgtacttctgcag

SEQ ID NO: 3282 - DNA, 3026 bp, Artificial Sequence
  Description of Artificial Sequence: Synthetic DNA sequence of Thermus aquaticus DNA Polymerase L733G
atgagggggatgctgcccctctttgagcccaagggccgggtcctcctggtggacggccaccacctggcctaccgcaccttccacgccctgaagggcctcaccaccagccggggggagccggtgcaggcggtctacggcttcgccaagagcctcctcaaggccctcaaggaggacggggacgcggtgatcgtggtctttgacgccaaggccccctccttccgccacgaggcctacggggggtacaaggcgggccgggcccccacgccggaggactttccccggcaactcgccctcatcaaggagctggtggacctcctggggctggcgcgcctcgaggtcccgggctacgaggcggacgacgtcctggccagcctggccaagaaggcggaaaaggagggctacgaggtccgcatcctcaccgccgacaaagacctttaccagctcctttccgaccgcatccacgccctccaccccgaggggtacctcatcaccccggcctggctttgggaaaagtacggcctgaggcccgaccagtgggccgactaccgggccctgaccggggacgagtccgacaaccttcccggggtcaagggcatcggggagaagacggcgaggaagcttctggaggagtgggggagcctggaagccctcctcaagaacctggaccggctgaagcccgccatccgggagaagatcctggcccacatggacgatctgaagctctcctgggacctggccaaggtgcgcaccgacctgcccctggaggtggacttcgccaaaaggcgggagcccgaccgggagaggcttagggcctttctggagaggcttgagtttggcagcctcctccacgagttcggccttctggaaagccccaaggccctggaggaggccccctggcccccgccggaaggggccttcgtgggctttgtgctttcccgcaaggagcccatgtgggccgatcttctggccctggccgccgccagggggggccgggtccaccgggcccccgagccttataaagccctcagggacctgaaggaggcgcgggggcttctcgccaaagacctgagcgttctggccctgagggaaggccttggcctcccgcccggcgacgaccccatgctcctcgcctacctcctggacccttccaacaccacccccgagggggtggcccggcgctacggcggggagtggacggaggaggcgggggagcgggccgccctttccgagaggctcttcgccaacctgtgggggaggcttgagggggaggagaggctcctttggctttaccgggaggtggagaggcccctttccgctgtcctggcccacatggaggccacgggggtgcgcctggacgtggcctatctcagggccttgtccctggaggtggccgaggagatcgcccgcctcgaggccgaggtcttccgcctggccggccaccccttcaacctcaactcccgggaccagctggaaagggtcctctttgacgagctagggcttcccgccatcggcaagacggagaagaccggcaagcgctccaccagcgccgccgtcctggaggccctccgcgaggcccaccccatcgtggagaagatcctgcagtaccgggagctcaccaagctgaagagcacctacattgaccccttgccggacctcatccaccccaggacgggccgcctccacacccgcttcaaccagacggccacggccacgggcaggctaagtagctccgatcccaacctccagaacatccccgtccgcaccccgcttgggcagaggatccgccgggccttcatcgccgaggaggggtggctattggtggccctggactatagccagatagagctcagggtgctggcccacctctccggcgacgagaacctgatccgggtcttccaggaggggcgggacatccacacggagaccgccagctggatgttcggcgtcccccgggaggccgtggaccccctgatgcgccgggcggccaagaccatcaacttcggggtcctctacggcatgtcggcccaccgcctctcccaggagctagccatcccttacgaggaggcccaggccttcattgagcgctactttcagagcttccccaaggtgcgggcctggattgagaagaccctggaggagggcaggaggcgggggtacgtggagaccctcttcggccgccgccgctacgtgccagacggtgaggcccgggtgaagagcgtgcgggaggcggccgagcgcatggccttcaacatgcccgtccagggcaccgccgccgacctcatgaagctggctatggtgaagctcttccccaggctggaggaaatgggggccaggatgctccttcaggtccacgacgagctggtcctcgaggccccaaaagagagggcggaggccgtggcccggctggccaaggaggtcatggagggggtgtatcccctggccgtgcccctggaggtggaggtggggataggggaggactggctctccgccaaggagtgataccaccccatgctggcccaagccagcatgggggccccggcaaaaggtttctggggaagttaccaggcatggtgggccgaaggaaacaggaaacaagggtatgagggttttttgccctaaagaaaggccagggggtcctcccgaaggaaggcttccagggggataccccctgggcccaggagtagcccctttcctccaaaggcctgggtgaaggcttttagccctttggtcctttgggaaggggcgcttttgacctccaaagccagaaggcgccttcccttcttcaagacgaagtcaacctcctggtccctttcccgccagtagtacacctcaaagcccccgtgggggccgtgggccagaaggtgggcgcccacggcggtttccacgagccgccccatgagggcggcgtccgcccacacctcctttggggaaagccccaagaccgccgtgatgagccccgtattaagggccaggagcttggggctcgaggcgcggcgccggaagggctcggcggcgtacttctgcag

SEQ ID NO: 3283 - DNA, 3026 bp, Artificial Sequence
  Description of Artificial Sequence: Synthetic DNA sequence of Thermus aquaticus DNA Polymerase L733Q
atgagggggatgctgcccctctttgagcccaagggccgggtcctcctggtggacggccaccacctggcctaccgcaccttccacgccctgaagggcctcaccaccagccggggggagccggtgcaggcggtctacggcttcgccaagagcctcctcaaggccctcaaggaggacggggacgcggtgatcgtggtctttgacgccaaggccccctccttccgccacgaggcctacggggggtacaaggcgggccgggcccccacgccggaggactttccccggcaactcgccctcatcaaggagctggtggacctcctggggctggcgcgcctcgaggtcccgggctacgaggcggacgacgtcctggccagcctggccaagaaggcggaaaaggagggctacgaggtccgcatcctcaccgccgacaaagacctttaccagctcctttccgaccgcatccacgccctccaccccgaggggtacctcatcaccccggcctggctttgggaaaagtacggcctgaggcccgaccagtgggccgactaccgggccctgaccggggacgagtccgacaaccttcccggggtcaagggcatcggggagaagacggcgaggaagcttctggaggagtgggggagcctggaagccctcctcaagaacctggaccggctgaagcccgccatccgggagaagatcctggcccacatggacgatctgaagctctcctgggacctggccaaggtgcgcaccgacctgcccctggaggtggacttcgccaaaaggcgggagcccgaccgggagaggcttagggcctttctggagaggcttgagtttggcagcctcctccacgagttcggccttctggaaagccccaaggccctggaggaggccccctggcccccgccggaaggggccttcgtgggctttgtgctttcccgcaaggagcccatgtgggccgatcttctggccctggccgccgccagggggggccgggtccaccgggcccccgagccttataaagccctcagggacctgaaggaggcgcgggggcttctcgccaaagacctgagcgttctggccctgagggaaggccttggcctcccgcccggcgacgaccccatgctcctcgcctacctcctggacccttccaacaccacccccgagggggtggcccggcgctacggcggggagtggacggaggaggcgggggagcgggccgccctttccgagaggctcttcgccaacctgtgggggaggcttgagggggaggagaggctcctttggctttaccgggaggtggagaggcccctttccgctgtcctggcccacatggaggccacgggggtgcgcctggacgtggcctatctcagggccttgtccctggaggtggccgaggagatcgcccgcctcgaggccgaggtcttccgcctggccggccaccccttcaacctcaactcccgggaccagctggaaagggtcctctttgacgagctagggcttcccgccatcggcaagacggagaagaccggcaagcgctccaccagcgccgccgtcctggaggccctccgcgaggcccaccccatcgtggagaagatcctgcagtaccgggagctcaccaagctgaagagcacctacattgaccccttgccggacctcatccaccccaggacgggccgcctccacacccgcttcaaccagacggccacggccacgggcaggctaagtagctccgatcccaacctccagaacatccccgtccgcaccccgcttgggcagaggatccgccgggccttcatcgccgaggaggggtggctattggtggccctggactatagccagatagagctcagggtgctggcccacctctccggcgacgagaacctgatccgggtcttccaggaggggcgggacatccacacggagaccgccagctggatgttcggcgtcccccgggaggccgtggaccccctgatgcgccgggcggccaagaccatcaacttcggggtcctctacggcatgtcggcccaccgcctctcccaggagctagccatcccttacgaggaggcccaggccttcattgagcgctactttcagagcttccccaaggtgcgggcctggattgagaagaccctggaggagggcaggaggcgggggtacgtggagaccctcttcggccgccgccgctacgtgccagaccaagaggcccgggtgaagagcgtgcgggaggcggccgagcgcatggccttcaacatgcccgtccagggcaccgccgccgacctcatgaagctggctatggtgaagctcttccccaggctggaggaaatgggggccaggatgctccttcaggtccacgacgagctggtcctcgaggccccaaaagagagggcggaggccgtggcccggctggccaaggaggtcatggagggggtgtatcccctggccgtgcccctggaggtggaggtggggataggggaggactggctctccgccaaggagtgataccaccccatgctggcccaagccagcatgggggccccggcaaaaggtttctggggaagttaccaggcatggtgggccgaaggaaacaggaaacaagggtatgagggttttttgccctaaagaaaggccagggggtcctcccgaaggaaggcttccagggggataccccctgggcccaggagtagcccctttcctccaaaggcctgggtgaaggcttttagccctttggtcctttgggaaggggcgcttttgacctccaaagccagaaggcgccttcccttcttcaagacgaagtcaacctcctggtccctttcccgccagtagtacacctcaaagcccccgtgggggccgtgggccagaaggtgggcgcccacggcggtttccacgagccgccccatgagggcggcgtccgcccacacctcctttggggaaagccccaagaccgccgtgatgagccccgtattaagggccaggagcttggggctcgaggcgcggcgccggaagggctcggcggcgtacttctgcag

SEQ ID NO: 3284 - DNA, 3026 bp, Artificial Sequence
  Description of Artificial Sequence: Synthetic DNA sequence of Thermus aquaticus DNA Polymerase L733H
atgagggggatgctgcccctctttgagcccaagggccgggtcctcctggtggacggccaccacctggcctaccgcaccttccacgccctgaagggcctcaccaccagccggggggagccggtgcaggcggtctacggcttcgccaagagcctcctcaaggccctcaaggaggacggggacgcggtgatcgtggtctttgacgccaaggccccctccttccgccacgaggcctacggggggtacaaggcgggccgggcccccacgccggaggactttccccggcaactcgccctcatcaaggagctggtggacctcctggggctggcgcgcctcgaggtcccgggctacgaggcggacgacgtcctggccagcctggccaagaaggcggaaaaggagggctacgaggtccgcatcctcaccgccgacaaagacctttaccagctcctttccgaccgcatccacgccctccaccccgaggggtacctcatcaccccggcctggctttgggaaaagtacggcctgaggcccgaccagtgggccgactaccgggccctgaccggggacgagtccgacaaccttcccggggtcaagggcatcggggagaagacggcgaggaagcttctggaggagtgggggagcctggaagccctcctcaagaacctggaccggctgaagcccgccatccgggagaagatcctggcccacatggacgatctgaagctctcctgggacctggccaaggtgcgcaccgacctgcccctggaggtggacttcgccaaaaggcgggagcccgaccgggagaggcttagggcctttctggagaggcttgagtttggcagcctcctccacgagttcggccttctggaaagccccaaggccctggaggaggccccctggcccccgccggaaggggccttcgtgggctttgtgctttcccgcaaggagcccatgtgggccgatcttctggccctggccgccgccagggggggccgggtccaccgggcccccgagccttataaagccctcagggacctgaaggaggcgcgggggcttctcgccaaagacctgagcgttctggccctgagggaaggccttggcctcccgcccggcgacgaccccatgctcctcgcctacctcctggacccttccaacaccacccccgagggggtggcccggcgctacggcggggagtggacggaggaggcgggggagcgggccgccctttccgagaggctcttcgccaacctgtgggggaggcttgagggggaggagaggctcctttggctttaccgggaggtggagaggcccctttccgctgtcctggcccacatggaggccacgggggtgcgcctggacgtggcctatctcagggccttgtccctggaggtggccgaggagatcgcccgcctcgaggccgaggtcttccgcctggccggccaccccttcaacctcaactcccgggaccagctggaaagggtcctctttgacgagctagggcttcccgccatcggcaagacggagaagaccggcaagcgctccaccagcgccgccgtcctggaggccctccgcgaggcccaccccatcgtggagaagatcctgcagtaccgggagctcaccaagctgaagagcacctacattgaccccttgccggacctcatccaccccaggacgggccgcctccacacccgcttcaaccagacggccacggccacgggcaggctaagtagctccgatcccaacctccagaacatccccgtccgcaccccgcttgggcagaggatccgccgggccttcatcgccgaggaggggtggctattggtggccctggactatagccagatagagctcagggtgctggcccacctctccggcgacgagaacctgatccgggtcttccaggaggggcgggacatccacacggagaccgccagctggatgttcggcgtcccccgggaggccgtggaccccctgatgcgccgggcggccaagaccatcaacttcggggtcctctacggcatgtcggcccaccgcctctcccaggagctagccatcccttacgaggaggcccaggccttcattgagcgctactttcagagcttccccaaggtgcgggcctggattgagaagaccctggaggagggcaggaggcgggggtacgtggagaccctcttcggccgccgccgctacgtgccagaccatgaggcccgggtgaagagcgtgcgggaggcggccgagcgcatggccttcaacatgcccgtccagggcaccgccgccgacctcatgaagctggctatggtgaagctcttccccaggctggaggaaatgggggccaggatgctccttcaggtccacgacgagctggtcctcgaggccccaaaagagagggcggaggccgtggcccggctggccaaggaggtcatggagggggtgtatcccctggccgtgcccctggaggtggaggtggggataggggaggactggctctccgccaaggagtgataccaccccatgctggcccaagccagcatgggggccccggcaaaaggtttctggggaagttaccaggcatggtgggccgaaggaaacaggaaacaagggtatgagggttttttgccctaaagaaaggccagggggtcctcccgaaggaaggcttccagggggataccccctgggcccaggagtagcccctttcctccaaaggcctgggtgaaggcttttagccctttggtcctttgggaaggggcgcttttgacctccaaagccagaaggcgccttcccttcttcaagacgaagtcaacctcctggtccctttcccgccagtagtacacctcaaagcccccgtgggggccgtgggccagaaggtgggcgcccacggcggtttccacgagccgccccatgagggcggcgtccgcccacacctcctttggggaaagccccaagaccgccgtgatgagccccgtattaagggccaggagcttggggctcgaggcgcggcgccggaagggctcggcggcgtacttctgcag

SEQ ID NO: 3285 - DNA, 3026 bp, Artificial Sequence
  Description of Artificial Sequence: Synthetic DNA sequence of Thermus aquaticus DNA Polymerase L733I
atgagggggatgctgcccctctttgagcccaagggccgggtcctcctggtggacggccaccacctggcctaccgcaccttccacgccctgaagggcctcaccaccagccggggggagccggtgcaggcggtctacggcttcgccaagagcctcctcaaggccctcaaggaggacggggacgcggtgatcgtggtctttgacgccaaggccccctccttccgccacgaggcctacggggggtacaaggcgggccgggcccccacgccggaggactttccccggcaactcgccctcatcaaggagctggtggacctcctggggctggcgcgcctcgaggtcccgggctacgaggcggacgacgtcctggccagcctggccaagaaggcggaaaaggagggctacgaggtccgcatcctcaccgccgacaaagacctttaccagctcctttccgaccgcatccacgccctccaccccgaggggtacctcatcaccccggcctggctttgggaaaagtacggcctgaggcccgaccagtgggccgactaccgggccctgaccggggacgagtccgacaaccttcccggggtcaagggcatcggggagaagacggcgaggaagcttctggaggagtgggggagcctggaagccctcctcaagaacctggaccggctgaagcccgccatccgggagaagatcctggcccacatggacgatctgaagctctcctgggacctggccaaggtgcgcaccgacctgcccctggaggtggacttcgccaaaaggcgggagcccgaccgggagaggcttagggcctttctggagaggcttgagtttggcagcctcctccacgagttcggccttctggaaagccccaaggccctggaggaggccccctggcccccgccggaaggggccttcgtgggctttgtgctttcccgcaaggagcccatgtgggccgatcttctggccctggccgccgccagggggggccgggtccaccgggcccccgagccttataaagccctcagggacctgaaggaggcgcgggggcttctcgccaaagacctgagcgttctggccctgagggaaggccttggcctcccgcccggcgacgaccccatgctcctcgcctacctcctggacccttccaacaccacccccgagggggtggcccggcgctacggcggggagtggacggaggaggcgggggagcgggccgccctttccgagaggctcttcgccaacctgtgggggaggcttgagggggaggagaggctcctttggctttaccgggaggtggagaggcccctttccgctgtcctggcccacatggaggccacgggggtgcgcctggacgtggcctatctcagggccttgtccctggaggtggccgaggagatcgcccgcctcgaggccgaggtcttccgcctggccggccaccccttcaacctcaactcccgggaccagctggaaagggtcctctttgacgagctagggcttcccgccatcggcaagacggagaagaccggcaagcgctccaccagcgccgccgtcctggaggccctccgcgaggcccaccccatcgtggagaagatcctgcagtaccgggagctcaccaagctgaagagcacctacattgaccccttgccggacctcatccaccccaggacgggccgcctccacacccgcttcaaccagacggccacggccacgggcaggctaagtagctccgatcccaacctccagaacatccccgtccgcaccccgcttgggcagaggatccgccgggccttcatcgccgaggaggggtggctattggtggccctggactatagccagatagagctcagggtgctggcccacctctccggcgacgagaacctgatccgggtcttccaggaggggcgggacatccacacggagaccgccagctggatgttcggcgtcccccgggaggccgtggaccccctgatgcgccgggcggccaagaccatcaacttcggggtcctctacggcatgtcggcccaccgcctctcccaggagctagccatcccttacgaggaggcccaggccttcattgagcgctactttcagagcttccccaaggtgcgggcctggattgagaagaccctggaggagggcaggaggcgggggtacgtggagaccctcttcggccgccgccgctacgtgccagacattgaggcccgggtgaagagcgtgcgggaggcggccgagcgcatggccttcaacatgcccgtccagggcaccgccgccgacctcatgaagctggctatggtgaagctcttccccaggctggaggaaatgggggccaggatgctccttcaggtccacgacgagctggtcctcgaggccccaaaagagagggcggaggccgtggcccggctggccaaggaggtcatggagggggtgtatcccctggccgtgcccctggaggtggaggtggggataggggaggactggctctccgccaaggagtgataccaccccatgctggcccaagccagcatgggggccccggcaaaaggtttctggggaagttaccaggcatggtgggccgaaggaaacaggaaacaagggtatgagggttttttgccctaaagaaaggccagggggtcctcccgaaggaaggcttccagggggataccccctgggcccaggagtagcccctttcctccaaaggcctgggtgaaggcttttagccctttggtcctttgggaaggggcgcttttgacctccaaagccagaaggcgccttcccttcttcaagacgaagtcaacctcctggtccctttcccgccagtagtacacctcaaagcccccgtgggggccgtgggccagaaggtgggcgcccacggcggtttccacgagccgccccatgagggcggcgtccgcccacacctcctttggggaaagccccaagaccgccgtgatgagccccgtattaagggccaggagcttggggctcgaggcgcggcgccggaagggctcggcggcgtacttctgcag

SEQ ID NO: 3286 - DNA, 3026 bp, Artificial Sequence
  Description of Artificial Sequence: Synthetic DNA sequence of Thermus aquaticus DNA Polymerase L733K
atgagggggatgctgcccctctttgagcccaagggccgggtcctcctggtggacggccaccacctggcctaccgcaccttccacgccctgaagggcctcaccaccagccggggggagccggtgcaggcggtctacggcttcgccaagagcctcctcaaggccctcaaggaggacggggacgcggtgatcgtggtctttgacgccaaggccccctccttccgccacgaggcctacggggggtacaaggcgggccgggcccccacgccggaggactttccccggcaactcgccctcatcaaggagctggtggacctcctggggctggcgcgcctcgaggtcccgggctacgaggcggacgacgtcctggccagcctggccaagaaggcggaaaaggagggctacgaggtccgcatcctcaccgccgacaaagacctttaccagctcctttccgaccgcatccacgccctccaccccgaggggtacctcatcaccccggcctggctttgggaaaagtacggcctgaggcccgaccagtgggccgactaccgggccctgaccggggacgagtccgacaaccttcccggggtcaagggcatcggggagaagacggcgaggaagcttctggaggagtgggggagcctggaagccctcctcaagaacctggaccggctgaagcccgccatccgggagaagatcctggcccacatggacgatctgaagctctcctgggacctggccaaggtgcgcaccgacctgcccctggaggtggacttcgccaaaaggcgggagcccgaccgggagaggcttagggcctttctggagaggcttgagtttggcagcctcctccacgagttcggccttctggaaagccccaaggccctggaggaggccccctggcccccgccggaaggggccttcgtgggctttgtgctttcccgcaaggagcccatgtgggccgatcttctggccctggccgccgccagggggggccgggtccaccgggcccccgagccttataaagccctcagggacctgaaggaggcgcgggggcttctcgccaaagacctgagcgttctggccctgagggaaggccttggcctcccgcccggcgacgaccccatgctcctcgcctacctcctggacccttccaacaccacccccgagggggtggcccggcgctacggcggggagtggacggaggaggcgggggagcgggccgccctttccgagaggctcttcgccaacctgtgggggaggcttgagggggaggagaggctcctttggctttaccgggaggtggagaggcccctttccgctgtcctggcccacatggaggccacgggggtgcgcctggacgtggcctatctcagggccttgtccctggaggtggccgaggagatcgcccgcctcgaggccgaggtcttccgcctggccggccaccccttcaacctcaactcccgggaccagctggaaagggtcctctttgacgagctagggcttcccgccatcggcaagacggagaagaccggcaagcgctccaccagcgccgccgtcctggaggccctccgcgaggcccaccccatcgtggagaagatcctgcagtaccgggagctcaccaagctgaagagcacctacattgaccccttgccggacctcatccaccccaggacgggccgcctccacacccgcttcaaccagacggccacggccacgggcaggctaagtagctccgatcccaacctccagaacatccccgtccgcaccccgcttgggcagaggatccgccgggccttcatcgccgaggaggggtggctattggtggccctggactatagccagatagagctcagggtgctggcccacctctccggcgacgagaacctgatccgggtcttccaggaggggcgggacatccacacggagaccgccagctggatgttcggcgtcccccgggaggccgtggaccccctgatgcgccgggcggccaagaccatcaacttcggggtcctctacggcatgtcggcccaccgcctctcccaggagctagccatcccttacgaggaggcccaggccttcattgagcgctactttcagagcttccccaaggtgcgggcctggattgagaagaccctggaggagggcaggaggcgggggtacgtggagaccctcttcggccgccgccgctacgtgccagacaaagaggcccgggtgaagagcgtgcgggaggcggccgagcgcatggccttcaacatgcccgtccagggcaccgccgccgacctcatgaagctggctatggtgaagctcttccccaggctggaggaaatgggggccaggatgctccttcaggtccacgacgagctggtcctcgaggccccaaaagagagggcggaggccgtggcccggctggccaaggaggtcatggagggggtgtatcccctggccgtgcccctggaggtggaggtggggataggggaggactggctctccgccaaggagtgataccaccccatgctggcccaagccagcatgggggccccggcaaaaggtttctggggaagttaccaggcatggtgggccgaaggaaacaggaaacaagggtatgagggttttttgccctaaagaaaggccagggggtcctcccgaaggaaggcttccagggggataccccctgggcccaggagtagcccctttcctccaaaggcctgggtgaaggcttttagccctttggtcctttgggaaggggcgcttttgacctccaaagccagaaggcgccttcccttcttcaagacgaagtcaacctcctggtccctttcccgccagtagtacacctcaaagcccccgtgggggccgtgggccagaaggtgggcgcccacggcggtttccacgagccgccccatgagggcggcgtccgcccacacctcctttggggaaagccccaagaccgccgtgatgagccccgtattaagggccaggagcttggggctcgaggcgcggcgccggaagggctcggcggcgtacttctgcag

SEQ ID NO: 3287 - DNA, 3026 bp, Artificial Sequence
  Description of Artificial Sequence: Synthetic DNA sequence of Thermus aquaticus DNA Polymerase L733E
atgagggggatgctgcccctctttgagcccaagggccgggtcctcctggtggacggccaccacctggcctaccgcaccttccacgccctgaagggcctcaccaccagccggggggagccggtgcaggcggtctacggcttcgccaagagcctcctcaaggccctcaaggaggacggggacgcggtgatcgtggtctttgacgccaaggccccctccttccgccacgaggcctacggggggtacaaggcgggccgggcccccacgccggaggactttccccggcaactcgccctcatcaaggagctggtggacctcctggggctggcgcgcctcgaggtcccgggctacgaggcggacgacgtcctggccagcctggccaagaaggcggaaaaggagggctacgaggtccgcatcctcaccgccgacaaagacctttaccagctcctttccgaccgcatccacgccctccaccccgaggggtacctcatcaccccggcctggctttgggaaaagtacggcctgaggcccgaccagtgggccgactaccgggccctgaccggggacgagtccgacaaccttcccggggtcaagggcatcggggagaagacggcgaggaagcttctggaggagtgggggagcctggaagccctcctcaagaacctggaccggctgaagcccgccatccgggagaagatcctggcccacatggacgatctgaagctctcctgggacctggccaaggtgcgcaccgacctgcccctggaggtggacttcgccaaaaggcgggagcccgaccgggagaggcttagggcctttctggagaggcttgagtttggcagcctcctccacgagttcggccttctggaaagccccaaggccctggaggaggccccctggcccccgccggaaggggccttcgtgggctttgtgctttcccgcaaggagcccatgtgggccgatcttctggccctggccgccgccagggggggccgggtccaccgggcccccgagccttataaagccctcagggacctgaaggaggcgcgggggcttctcgccaaagacctgagcgttctggccctgagggaaggccttggcctcccgcccggcgacgaccccatgctcctcgcctacctcctggacccttccaacaccacccccgagggggtggcccggcgctacggcggggagtggacggaggaggcgggggagcgggccgccctttccgagaggctcttcgccaacctgtgggggaggcttgagggggaggagaggctcctttggctttaccgggaggtggagaggcccctttccgctgtcctggcccacatggaggccacgggggtgcgcctggacgtggcctatctcagggccttgtccctggaggtggccgaggagatcgcccgcctcgaggccgaggtcttccgcctggccggccaccccttcaacctcaactcccgggaccagctggaaagggtcctctttgacgagctagggcttcccgccatcggcaagacggagaagaccggcaagcgctccaccagcgccgccgtcctggaggccctccgcgaggcccaccccatcgtggagaagatcctgcagtaccgggagctcaccaagctgaagagcacctacattgaccccttgccggacctcatccaccccaggacgggccgcctccacacccgcttcaaccagacggccacggccacgggcaggctaagtagctccgatcccaacctccagaacatccccgtccgcaccccgcttgggcagaggatccgccgggccttcatcgccgaggaggggtggctattggtggccctggactatagccagatagagctcagggtgctggcccacctctccggcgacgagaacctgatccgggtcttccaggaggggcgggacatccacacggagaccgccagctggatgttcggcgtcccccgggaggccgtggaccccctgatgcgccgggcggccaagaccatcaacttcggggtcctctacggcatgtcggcccaccgcctctcccaggagctagccatcccttacgaggaggcccaggccttcattgagcgctactttcagagcttccccaaggtgcgggcctggattgagaagaccctggaggagggcaggaggcgggggtacgtggagaccctcttcggccgccgccgctacgtgccagacgaagaggcccgggtgaagagcgtgcgggaggcggccgagcgcatggccttcaacatgcccgtccagggcaccgccgccgacctcatgaagctggctatggtgaagctcttccccaggctggaggaaatgggggccaggatgctccttcaggtccacgacgagctggtcctcgaggccccaaaagagagggcggaggccgtggcccggctggccaaggaggtcatggagggggtgtatcccctggccgtgcccctggaggtggaggtggggataggggaggactggctctccgccaaggagtgataccaccccatgctggcccaagccagcatgggggccccggcaaaaggtttctggggaagttaccaggcatggtgggccgaaggaaacaggaaacaagggtatgagggttttttgccctaaagaaaggccagggggtcctcccgaaggaaggcttccagggggataccccctgggcccaggagtagcccctttcctccaaaggcctgggtgaaggcttttagccctttggtcctttgggaaggggcgcttttgacctccaaagccagaaggcgccttcccttcttcaagacgaagtcaacctcctggtccctttcccgccagtagtacacctcaaagcccccgtgggggccgtgggccagaaggtgggcgcccacggcggtttccacgagccgccccatgagggcggcgtccgcccacacctcctttggggaaagccccaagaccgccgtgatgagccccgtattaagggccaggagcttggggctcgaggcgcggcgccggaagggctcggcggcgtacttctgcag

SEQ ID NO: 3288 - DNA, 3026 bp, Artificial Sequence
  Description of Artificial Sequence: Synthetic DNA sequence of Thermus aquaticus DNA Polymerase L733D
atgagggggatgctgcccctctttgagcccaagggccgggtcctcctggtggacggccaccacctggcctaccgcaccttccacgccctgaagggcctcaccaccagccggggggagccggtgcaggcggtctacggcttcgccaagagcctcctcaaggccctcaaggaggacggggacgcggtgatcgtggtctttgacgccaaggccccctccttccgccacgaggcctacggggggtacaaggcgggccgggcccccacgccggaggactttccccggcaactcgccctcatcaaggagctggtggacctcctggggctggcgcgcctcgaggtcccgggctacgaggcggacgacgtcctggccagcctggccaagaaggcggaaaaggagggctacgaggtccgcatcctcaccgccgacaaagacctttaccagctcctttccgaccgcatccacgccctccaccccgaggggtacctcatcaccccggcctggctttgggaaaagtacggcctgaggcccgaccagtgggccgactaccgggccctgaccggggacgagtccgacaaccttcccggggtcaagggcatcggggagaagacggcgaggaagcttctggaggagtgggggagcctggaagccctcctcaagaacctggaccggctgaagcccgccatccgggagaagatcctggcccacatggacgatctgaagctctcctgggacctggccaaggtgcgcaccgacctgcccctggaggtggacttcgccaaaaggcgggagcccgaccgggagaggcttagggcctttctggagaggcttgagtttggcagcctcctccacgagttcggccttctggaaagccccaaggccctggaggaggccccctggcccccgccggaaggggccttcgtgggctttgtgctttcccgcaaggagcccatgtgggccgatcttctggccctggccgccgccagggggggccgggtccaccgggcccccgagccttataaagccctcagggacctgaaggaggcgcgggggcttctcgccaaagacctgagcgttctggccctgagggaaggccttggcctcccgcccggcgacgaccccatgctcctcgcctacctcctggacccttccaacaccacccccgagggggtggcccggcgctacggcggggagtggacggaggaggcgggggagcgggccgccctttccgagaggctcttcgccaacctgtgggggaggcttgagggggaggagaggctcctttggctttaccgggaggtggagaggcccctttccgctgtcctggcccacatggaggccacgggggtgcgcctggacgtggcctatctcagggccttgtccctggaggtggccgaggagatcgcccgcctcgaggccgaggtcttccgcctggccggccaccccttcaacctcaactcccgggaccagctggaaagggtcctctttgacgagctagggcttcccgccatcggcaagacggagaagaccggcaagcgctccaccagcgccgccgtcctggaggccctccgcgaggcccaccccatcgtggagaagatcctgcagtaccgggagctcaccaagctgaagagcacctacattgaccccttgccggacctcatccaccccaggacgggccgcctccacacccgcttcaaccagacggccacggccacgggcaggctaagtagctccgatcccaacctccagaacatccccgtccgcaccccgcttgggcagaggatccgccgggccttcatcgccgaggaggggtggctattggtggccctggactatagccagatagagctcagggtgctggcccacctctccggcgacgagaacctgatccgggtcttccaggaggggcgggacatccacacggagaccgccagctggatgttcggcgtcccccgggaggccgtggaccccctgatgcgccgggcggccaagaccatcaacttcggggtcctctacggcatgtcggcccaccgcctctcccaggagctagccatcccttacgaggaggcccaggccttcattgagcgctactttcagagcttccccaaggtgcgggcctggattgagaagaccctggaggagggcaggaggcgggggtacgtggagaccctcttcggccgccgccgctacgtgccagacgatgaggcccgggtgaagagcgtgcgggaggcggccgagcgcatggccttcaacatgcccgtccagggcaccgccgccgacctcatgaagctggctatggtgaagctcttccccaggctggaggaaatgggggccaggatgctccttcaggtccacgacgagctggtcctcgaggccccaaaagagagggcggaggccgtggcccggctggccaaggaggtcatggagggggtgtatcccctggccgtgcccctggaggtggaggtggggataggggaggactggctctccgccaaggagtgataccaccccatgctggcccaagccagcatgggggccccggcaaaaggtttctggggaagttaccaggcatggtgggccgaaggaaacaggaaacaagggtatgagggttttttgccctaaagaaaggccagggggtcctcccgaaggaaggcttccagggggataccccctgggcccaggagtagcccctttcctccaaaggcctgggtgaaggcttttagccctttggtcctttgggaaggggcgcttttgacctccaaagccagaaggcgccttcccttcttcaagacgaagtcaacctcctggtccctttcccgccagtagtacacctcaaagcccccgtgggggccgtgggccagaaggtgggcgcccacggcggtttccacgagccgccccatgagggcggcgtccgcccacacctcctttggggaaagccccaagaccgccgtgatgagccccgtattaagggccaggagcttggggctcgaggcgcggcgccggaagggctcggcggcgtacttctgcag

SEQ ID NO: 3289 - DNA, 3026 bp, Artificial Sequence
  Description of Artificial Sequence: Synthetic DNA sequence of Thermus aquaticus DNA Polymerase L733F
atgagggggatgctgcccctctttgagcccaagggccgggtcctcctggtggacggccaccacctggcctaccgcaccttccacgccctgaagggcctcaccaccagccggggggagccggtgcaggcggtctacggcttcgccaagagcctcctcaaggccctcaaggaggacggggacgcggtgatcgtggtctttgacgccaaggccccctccttccgccacgaggcctacggggggtacaaggcgggccgggcccccacgccggaggactttccccggcaactcgccctcatcaaggagctggtggacctcctggggctggcgcgcctcgaggtcccgggctacgaggcggacgacgtcctggccagcctggccaagaaggcggaaaaggagggctacgaggtccgcatcctcaccgccgacaaagacctttaccagctcctttccgaccgcatccacgccctccaccccgaggggtacctcatcaccccggcctggctttgggaaaagtacggcctgaggcccgaccagtgggccgactaccgggccctgaccggggacgagtccgacaaccttcccggggtcaagggcatcggggagaagacggcgaggaagcttctggaggagtgggggagcctggaagccctcctcaagaacctggaccggctgaagcccgccatccgggagaagatcctggcccacatggacgatctgaagctctcctgggacctggccaaggtgcgcaccgacctgcccctggaggtggacttcgccaaaaggcgggagcccgaccgggagaggcttagggcctttctggagaggcttgagtttggcagcctcctccacgagttcggccttctggaaagccccaaggccctggaggaggccccctggcccccgccggaaggggccttcgtgggctttgtgctttcccgcaaggagcccatgtgggccgatcttctggccctggccgccgccagggggggccgggtccaccgggcccccgagccttataaagccctcagggacctgaaggaggcgcgggggcttctcgccaaagacctgagcgttctggccctgagggaaggccttggcctcccgcccggcgacgaccccatgctcctcgcctacctcctggacccttccaacaccacccccgagggggtggcccggcgctacggcggggagtggacggaggaggcgggggagcgggccgccctttccgagaggctcttcgccaacctgtgggggaggcttgagggggaggagaggctcctttggctttaccgggaggtggagaggcccctttccgctgtcctggcccacatggaggccacgggggtgcgcctggacgtggcctatctcagggccttgtccctggaggtggccgaggagatcgcccgcctcgaggccgaggtcttccgcctggccggccaccccttcaacctcaactcccgggaccagctggaaagggtcctctttgacgagctagggcttcccgccatcggcaagacggagaagaccggcaagcgctccaccagcgccgccgtcctggaggccctccgcgaggcccaccccatcgtggagaagatcctgcagtaccgggagctcaccaagctgaagagcacctacattgaccccttgccggacctcatccaccccaggacgggccgcctccacacccgcttcaaccagacggccacggccacgggcaggctaagtagctccgatcccaacctccagaacatccccgtccgcaccccgcttgggcagaggatccgccgggccttcatcgccgaggaggggtggctattggtggccctggactatagccagatagagctcagggtgctggcccacctctccggcgacgagaacctgatccgggtcttccaggaggggcgggacatccacacggagaccgccagctggatgttcggcgtcccccgggaggccgtggaccccctgatgcgccgggcggccaagaccatcaacttcggggtcctctacggcatgtcggcccaccgcctctcccaggagctagccatcccttacgaggaggcccaggccttcattgagcgctactttcagagcttccccaaggtgcgggcctggattgagaagaccctggaggagggcaggaggcgggggtacgtggagaccctcttcggccgccgccgctacgtgccagactttgaggcccgggtgaagagcgtgcgggaggcggccgagcgcatggccttcaacatgcccgtccagggcaccgccgccgacctcatgaagctggctatggtgaagctcttccccaggctggaggaaatgggggccaggatgctccttcaggtccacgacgagctggtcctcgaggccccaaaagagagggcggaggccgtggcccggctggccaaggaggtcatggagggggtgtatcccctggccgtgcccctggaggtggaggtggggataggggaggactggctctccgccaaggagtgataccaccccatgctggcccaagccagcatgggggccccggcaaaaggtttctggggaagttaccaggcatggtgggccgaaggaaacaggaaacaagggtatgagggttttttgccctaaagaaaggccagggggtcctcccgaaggaaggcttccagggggataccccctgggcccaggagtagcccctttcctccaaaggcctgggtgaaggcttttagccctttggtcctttgggaaggggcgcttttgacctccaaagccagaaggcgccttcccttcttcaagacgaagtcaacctcctggtccctttcccgccagtagtacacctcaaagcccccgtgggggccgtgggccagaaggtgggcgcccacggcggtttccacgagccgccccatgagggcggcgtccgcccacacctcctttggggaaagccccaagaccgccgtgatgagccccgtattaagggccaggagcttggggctcgaggcgcggcgccggaagggctcggcggcgtacttctgcag

SEQ ID NO: 3290 - DNA, 3026 bp, Artificial Sequence
  Description of Artificial Sequence: Synthetic DNA sequence of Thermus aquaticus DNA Polymerase L733S
atgagggggatgctgcccctctttgagcccaagggccgggtcctcctggtggacggccaccacctggcctaccgcaccttccacgccctgaagggcctcaccaccagccggggggagccggtgcaggcggtctacggcttcgccaagagcctcctcaaggccctcaaggaggacggggacgcggtgatcgtggtctttgacgccaaggccccctccttccgccacgaggcctacggggggtacaaggcgggccgggcccccacgccggaggactttccccggcaactcgccctcatcaaggagctggtggacctcctggggctggcgcgcctcgaggtcccgggctacgaggcggacgacgtcctggccagcctggccaagaaggcggaaaaggagggctacgaggtccgcatcctcaccgccgacaaagacctttaccagctcctttccgaccgcatccacgccctccaccccgaggggtacctcatcaccccggcctggctttgggaaaagtacggcctgaggcccgaccagtgggccgactaccgggccctgaccggggacgagtccgacaaccttcccggggtcaagggcatcggggagaagacggcgaggaagcttctggaggagtgggggagcctggaagccctcctcaagaacctggaccggctgaagcccgccatccgggagaagatcctggcccacatggacgatctgaagctctcctgggacctggccaaggtgcgcaccgacctgcccctggaggtggacttcgccaaaaggcgggagcccgaccgggagaggcttagggcctttctggagaggcttgagtttggcagcctcctccacgagttcggccttctggaaagccccaaggccctggaggaggccccctggcccccgccggaaggggccttcgtgggctttgtgctttcccgcaaggagcccatgtgggccgatcttctggccctggccgccgccagggggggccgggtccaccgggcccccgagccttataaagccctcagggacctgaaggaggcgcgggggcttctcgccaaagacctgagcgttctggccctgagggaaggccttggcctcccgcccggcgacgaccccatgctcctcgcctacctcctggacccttccaacaccacccccgagggggtggcccggcgctacggcggggagtggacggaggaggcgggggagcgggccgccctttccgagaggctcttcgccaacctgtgggggaggcttgagggggaggagaggctcctttggctttaccgggaggtggagaggcccctttccgctgtcctggcccacatggaggccacgggggtgcgcctggacgtggcctatctcagggccttgtccctggaggtggccgaggagatcgcccgcctcgaggccgaggtcttccgcctggccggccaccccttcaacctcaactcccgggaccagctggaaagggtcctctttgacgagctagggcttcccgccatcggcaagacggagaagaccggcaagcgctccaccagcgccgccgtcctggaggccctccgcgaggcccaccccatcgtggagaagatcctgcagtaccgggagctcaccaagctgaagagcacctacattgaccccttgccggacctcatccaccccaggacgggccgcctccacacccgcttcaaccagacggccacggccacgggcaggctaagtagctccgatcccaacctccagaacatccccgtccgcaccccgcttgggcagaggatccgccgggccttcatcgccgaggaggggtggctattggtggccctggactatagccagatagagctcagggtgctggcccacctctccggcgacgagaacctgatccgggtcttccaggaggggcgggacatccacacggagaccgccagctggatgttcggcgtcccccgggaggccgtggaccccctgatgcgccgggcggccaagaccatcaacttcggggtcctctacggcatgtcggcccaccgcctctcccaggagctagccatcccttacgaggaggcccaggccttcattgagcgctactttcagagcttccccaaggtgcgggcctggattgagaagaccctggaggagggcaggaggcgggggtacgtggagaccctcttcggccgccgccgctacgtgccagactctgaggcccgggtgaagagcgtgcgggaggcggccgagcgcatggccttcaacatgcccgtccagggcaccgccgccgacctcatgaagctggctatggtgaagctcttccccaggctggaggaaatgggggccaggatgctccttcaggtccacgacgagctggtcctcgaggccccaaaagagagggcggaggccgtggcccggctggccaaggaggtcatggagggggtgtatcccctggccgtgcccctggaggtggaggtggggataggggaggactggctctccgccaaggagtgataccaccccatgctggcccaagccagcatgggggccccggcaaaaggtttctggggaagttaccaggcatggtgggccgaaggaaacaggaaacaagggtatgagggttttttgccctaaagaaaggccagggggtcctcccgaaggaaggcttccagggggataccccctgggcccaggagtagcccctttcctccaaaggcctgggtgaaggcttttagccctttggtcctttgggaaggggcgcttttgacctccaaagccagaaggcgccttcccttcttcaagacgaagtcaacctcctggtccctttcccgccagtagtacacctcaaagcccccgtgggggccgtgggccagaaggtgggcgcccacggcggtttccacgagccgccccatgagggcggcgtccgcccacacctcctttggggaaagccccaagaccgccgtgatgagccccgtattaagggccaggagcttggggctcgaggcgcggcgccggaagggctcggcggcgtacttctgcag

SEQ ID NO: 3291 - DNA, 3026 bp, Artificial Sequence
  Description of Artificial Sequence: Synthetic DNA sequence of Thermus aquaticus DNA Polymerase L733Y
atgagggggatgctgcccctctttgagcccaagggccgggtcctcctggtggacggccaccacctggcctaccgcaccttccacgccctgaagggcctcaccaccagccggggggagccggtgcaggcggtctacggcttcgccaagagcctcctcaaggccctcaaggaggacggggacgcggtgatcgtggtctttgacgccaaggccccctccttccgccacgaggcctacggggggtacaaggcgggccgggcccccacgccggaggactttccccggcaactcgccctcatcaaggagctggtggacctcctggggctggcgcgcctcgaggtcccgggctacgaggcggacgacgtcctggccagcctggccaagaaggcggaaaaggagggctacgaggtccgcatcctcaccgccgacaaagacctttaccagctcctttccgaccgcatccacgccctccaccccgaggggtacctcatcaccccggcctggctttgggaaaagtacggcctgaggcccgaccagtgggccgactaccgggccctgaccggggacgagtccgacaaccttcccggggtcaagggcatcggggagaagacggcgaggaagcttctggaggagtgggggagcctggaagccctcctcaagaacctggaccggctgaagcccgccatccgggagaagatcctggcccacatggacgatctgaagctctcctgggacctggccaaggtgcgcaccgacctgcccctggaggtggacttcgccaaaaggcgggagcccgaccgggagaggcttagggcctttctggagaggcttgagtttggcagcctcctccacgagttcggccttctggaaagccccaaggccctggaggaggccccctggcccccgccggaaggggccttcgtgggctttgtgctttcccgcaaggagcccatgtgggccgatcttctggccctggccgccgccagggggggccgggtccaccgggcccccgagccttataaagccctcagggacctgaaggaggcgcgggggcttctcgccaaagacctgagcgttctggccctgagggaaggccttggcctcccgcccggcgacgaccccatgctcctcgcctacctcctggacccttccaacaccacccccgagggggtggcccggcgctacggcggggagtggacggaggaggcgggggagcgggccgccctttccgagaggctcttcgccaacctgtgggggaggcttgagggggaggagaggctcctttggctttaccgggaggtggagaggcccctttccgctgtcctggcccacatggaggccacgggggtgcgcctggacgtggcctatctcagggccttgtccctggaggtggccgaggagatcgcccgcctcgaggccgaggtcttccgcctggccggccaccccttcaacctcaactcccgggaccagctggaaagggtcctctttgacgagctagggcttcccgccatcggcaagacggagaagaccggcaagcgctccaccagcgccgccgtcctggaggccctccgcgaggcccaccccatcgtggagaagatcctgcagtaccgggagctcaccaagctgaagagcacctacattgaccccttgccggacctcatccaccccaggacgggccgcctccacacccgcttcaaccagacggccacggccacgggcaggctaagtagctccgatcccaacctccagaacatccccgtccgcaccccgcttgggcagaggatccgccgggccttcatcgccgaggaggggtggctattggtggccctggactatagccagatagagctcagggtgctggcccacctctccggcgacgagaacctgatccgggtcttccaggaggggcgggacatccacacggagaccgccagctggatgttcggcgtcccccgggaggccgtggaccccctgatgcgccgggcggccaagaccatcaacttcggggtcctctacggcatgtcggcccaccgcctctcccaggagctagccatcccttacgaggaggcccaggccttcattgagcgctactttcagagcttccccaaggtgcgggcctggattgagaagaccctggaggagggcaggaggcgggggtacgtggagaccctcttcggccgccgccgctacgtgccagactatgaggcccgggtgaagagcgtgcgggaggcggccgagcgcatggccttcaacatgcccgtccagggcaccgccgccgacctcatgaagctggctatggtgaagctcttccccaggctggaggaaatgggggccaggatgctccttcaggtccacgacgagctggtcctcgaggccccaaaagagagggcggaggccgtggcccggctggccaaggaggtcatggagggggtgtatcccctggccgtgcccctggaggtggaggtggggataggggaggactggctctccgccaaggagtgataccaccccatgctggcccaagccagcatgggggccccggcaaaaggtttctggggaagttaccaggcatggtgggccgaaggaaacaggaaacaagggtatgagggttttttgccctaaagaaaggccagggggtcctcccgaaggaaggcttccagggggataccccctgggcccaggagtagcccctttcctccaaaggcctgggtgaaggcttttagccctttggtcctttgggaaggggcgcttttgacctccaaagccagaaggcgccttcccttcttcaagacgaagtcaacctcctggtccctttcccgccagtagtacacctcaaagcccccgtgggggccgtgggccagaaggtgggcgcccacggcggtttccacgagccgccccatgagggcggcgtccgcccacacctcctttggggaaagccccaagaccgccgtgatgagccccgtattaagggccaggagcttggggctcgaggcgcggcgccggaagggctcggcggcgtacttctgcag

SEQ ID NO: 3292 - DNA, 3026 bp, Artificial Sequence
  Description of Artificial Sequence: Synthetic DNA sequence of Thermus aquaticus DNA Polymerase L733W
atgagggggatgctgcccctctttgagcccaagggccgggtcctcctggtggacggccaccacctggcctaccgcaccttccacgccctgaagggcctcaccaccagccggggggagccggtgcaggcggtctacggcttcgccaagagcctcctcaaggccctcaaggaggacggggacgcggtgatcgtggtctttgacgccaaggccccctccttccgccacgaggcctacggggggtacaaggcgggccgggcccccacgccggaggactttccccggcaactcgccctcatcaaggagctggtggacctcctggggctggcgcgcctcgaggtcccgggctacgaggcggacgacgtcctggccagcctggccaagaaggcggaaaaggagggctacgaggtccgcatcctcaccgccgacaaagacctttaccagctcctttccgaccgcatccacgccctccaccccgaggggtacctcatcaccccggcctggctttgggaaaagtacggcctgaggcccgaccagtgggccgactaccgggccctgaccggggacgagtccgacaaccttcccggggtcaagggcatcggggagaagacggcgaggaagcttctggaggagtgggggagcctggaagccctcctcaagaacctggaccggctgaagcccgccatccgggagaagatcctggcccacatggacgatctgaagctctcctgggacctggccaaggtgcgcaccgacctgcccctggaggtggacttcgccaaaaggcgggagcccgaccgggagaggcttagggcctttctggagaggcttgagtttggcagcctcctccacgagttcggccttctggaaagccccaaggccctggaggaggccccctggcccccgccggaaggggccttcgtgggctttgtgctttcccgcaaggagcccatgtgggccgatcttctggccctggccgccgccagggggggccgggtccaccgggcccccgagccttataaagccctcagggacctgaaggaggcgcgggggcttctcgccaaagacctgagcgttctggccctgagggaaggccttggcctcccgcccggcgacgaccccatgctcctcgcctacctcctggacccttccaacaccacccccgagggggtggcccggcgctacggcggggagtggacggaggaggcgggggagcgggccgccctttccgagaggctcttcgccaacctgtgggggaggcttgagggggaggagaggctcctttggctttaccgggaggtggagaggcccctttccgctgtcctggcccacatggaggccacgggggtgcgcctggacgtggcctatctcagggccttgtccctggaggtggccgaggagatcgcccgcctcgaggccgaggtcttccgcctggccggccaccccttcaacctcaactcccgggaccagctggaaagggtcctctttgacgagctagggcttcccgccatcggcaagacggagaagaccggcaagcgctccaccagcgccgccgtcctggaggccctccgcgaggcccaccccatcgtggagaagatcctgcagtaccgggagctcaccaagctgaagagcacctacattgaccccttgccggacctcatccaccccaggacgggccgcctccacacccgcttcaaccagacggccacggccacgggcaggctaagtagctccgatcccaacctccagaacatccccgtccgcaccccgcttgggcagaggatccgccgggccttcatcgccgaggaggggtggctattggtggccctggactatagccagatagagctcagggtgctggcccacctctccggcgacgagaacctgatccgggtcttccaggaggggcgggacatccacacggagaccgccagctggatgttcggcgtcccccgggaggccgtggaccccctgatgcgccgggcggccaagaccatcaacttcggggtcctctacggcatgtcggcccaccgcctctcccaggagctagccatcccttacgaggaggcccaggccttcattgagcgctactttcagagcttccccaaggtgcgggcctggattgagaagaccctggaggagggcaggaggcgggggtacgtggagaccctcttcggccgccgccgctacgtgccagactgggaggcccgggtgaagagcgtgcgggaggcggccgagcgcatggccttcaacatgcccgtccagggcaccgccgccgacctcatgaagctggctatggtgaagctcttccccaggctggaggaaatgggggccaggatgctccttcaggtccacgacgagctggtcctcgaggccccaaaagagagggcggaggccgtggcccggctggccaaggaggtcatggagggggtgtatcccctggccgtgcccctggaggtggaggtggggataggggaggactggctctccgccaaggagtgataccaccccatgctggcccaagccagcatgggggccccggcaaaaggtttctggggaagttaccaggcatggtgggccgaaggaaacaggaaacaagggtatgagggttttttgccctaaagaaaggccagggggtcctcccgaaggaaggcttccagggggataccccctgggcccaggagtagcccctttcctccaaaggcctgggtgaaggcttttagccctttggtcctttgggaaggggcgcttttgacctccaaagccagaaggcgccttcccttcttcaagacgaagtcaacctcctggtccctttcccgccagtagtacacctcaaagcccccgtgggggccgtgggccagaaggtgggcgcccacggcggtttccacgagccgccccatgagggcggcgtccgcccacacctcctttggggaaagccccaagaccgccgtgatgagccccgtattaagggccaggagcttggggctcgaggcgcggcgccggaagggctcggcggcgtacttctgcag

SEQ ID NO: 3293 - DNA, 3026 bp, Artificial Sequence
  Description of Artificial Sequence: Synthetic DNA sequence of Thermus aquaticus DNA Polymerase L733P
atgagggggatgctgcccctctttgagcccaagggccgggtcctcctggtggacggccaccacctggcctaccgcaccttccacgccctgaagggcctcaccaccagccggggggagccggtgcaggcggtctacggcttcgccaagagcctcctcaaggccctcaaggaggacggggacgcggtgatcgtggtctttgacgccaaggccccctccttccgccacgaggcctacggggggtacaaggcgggccgggcccccacgccggaggactttccccggcaactcgccctcatcaaggagctggtggacctcctggggctggcgcgcctcgaggtcccgggctacgaggcggacgacgtcctggccagcctggccaagaaggcggaaaaggagggctacgaggtccgcatcctcaccgccgacaaagacctttaccagctcctttccgaccgcatccacgccctccaccccgaggggtacctcatcaccccggcctggctttgggaaaagtacggcctgaggcccgaccagtgggccgactaccgggccctgaccggggacgagtccgacaaccttcccggggtcaagggcatcggggagaagacggcgaggaagcttctggaggagtgggggagcctggaagccctcctcaagaacctggaccggctgaagcccgccatccgggagaagatcctggcccacatggacgatctgaagctctcctgggacctggccaaggtgcgcaccgacctgcccctggaggtggacttcgccaaaaggcgggagcccgaccgggagaggcttagggcctttctggagaggcttgagtttggcagcctcctccacgagttcggccttctggaaagccccaaggccctggaggaggccccctggcccccgccggaaggggccttcgtgggctttgtgctttcccgcaaggagcccatgtgggccgatcttctggccctggccgccgccagggggggccgggtccaccgggcccccgagccttataaagccctcagggacctgaaggaggcgcgggggcttctcgccaaagacctgagcgttctggccctgagggaaggccttggcctcccgcccggcgacgaccccatgctcctcgcctacctcctggacccttccaacaccacccccgagggggtggcccggcgctacggcggggagtggacggaggaggcgggggagcgggccgccctttccgagaggctcttcgccaacctgtgggggaggcttgagggggaggagaggctcctttggctttaccgggaggtggagaggcccctttccgctgtcctggcccacatggaggccacgggggtgcgcctggacgtggcctatctcagggccttgtccctggaggtggccgaggagatcgcccgcctcgaggccgaggtcttccgcctggccggccaccccttcaacctcaactcccgggaccagctggaaagggtcctctttgacgagctagggcttcccgccatcggcaagacggagaagaccggcaagcgctccaccagcgccgccgtcctggaggccctccgcgaggcccaccccatcgtggagaagatcctgcagtaccgggagctcaccaagctgaagagcacctacattgaccccttgccggacctcatccaccccaggacgggccgcctccacacccgcttcaaccagacggccacggccacgggcaggctaagtagctccgatcccaacctccagaacatccccgtccgcaccccgcttgggcagaggatccgccgggccttcatcgccgaggaggggtggctattggtggccctggactatagccagatagagctcagggtgctggcccacctctccggcgacgagaacctgatccgggtcttccaggaggggcgggacatccacacggagaccgccagctggatgttcggcgtcccccgggaggccgtggaccccctgatgcgccgggcggccaagaccatcaacttcggggtcctctacggcatgtcggcccaccgcctctcccaggagctagccatcccttacgaggaggcccaggccttcattgagcgctactttcagagcttccccaaggtgcgggcctggattgagaagaccctggaggagggcaggaggcgggggtacgtggagaccctcttcggccgccgccgctacgtgccagaccctgaggcccgggtgaagagcgtgcgggaggcggccgagcgcatggccttcaacatgcccgtccagggcaccgccgccgacctcatgaagctggctatggtgaagctcttccccaggctggaggaaatgggggccaggatgctccttcaggtccacgacgagctggtcctcgaggccccaaaagagagggcggaggccgtggcccggctggccaaggaggtcatggagggggtgtatcccctggccgtgcccctggaggtggaggtggggataggggaggactggctctccgccaaggagtgataccaccccatgctggcccaagccagcatgggggccccggcaaaaggtttctggggaagttaccaggcatggtgggccgaaggaaacaggaaacaagggtatgagggttttttgccctaaagaaaggccagggggtcctcccgaaggaaggcttccagggggataccccctgggcccaggagtagcccctttcctccaaaggcctgggtgaaggcttttagccctttggtcctttgggaaggggcgcttttgacctccaaagccagaaggcgccttcccttcttcaagacgaagtcaacctcctggtccctttcccgccagtagtacacctcaaagcccccgtgggggccgtgggccagaaggtgggcgcccacggcggtttccacgagccgccccatgagggcggcgtccgcccacacctcctttggggaaagccccaagaccgccgtgatgagccccgtattaagggccaggagcttggggctcgaggcgcggcgccggaagggctcggcggcgtacttctgcag

SEQ ID NO: 3294 - DNA, 3026 bp, Artificial Sequence
  Description of Artificial Sequence: Synthetic DNA sequence of Thermus aquaticus DNA Polymerase L733M
atgagggggatgctgcccctctttgagcccaagggccgggtcctcctggtggacggccaccacctggcctaccgcaccttccacgccctgaagggcctcaccaccagccggggggagccggtgcaggcggtctacggcttcgccaagagcctcctcaaggccctcaaggaggacggggacgcggtgatcgtggtctttgacgccaaggccccctccttccgccacgaggcctacggggggtacaaggcgggccgggcccccacgccggaggactttccccggcaactcgccctcatcaaggagctggtggacctcctggggctggcgcgcctcgaggtcccgggctacgaggcggacgacgtcctggccagcctggccaagaaggcggaaaaggagggctacgaggtccgcatcctcaccgccgacaaagacctttaccagctcctttccgaccgcatccacgccctccaccccgaggggtacctcatcaccccggcctggctttgggaaaagtacggcctgaggcccgaccagtgggccgactaccgggccctgaccggggacgagtccgacaaccttcccggggtcaagggcatcggggagaagacggcgaggaagcttctggaggagtgggggagcctggaagccctcctcaagaacctggaccggctgaagcccgccatccgggagaagatcctggcccacatggacgatctgaagctctcctgggacctggccaaggtgcgcaccgacctgcccctggaggtggacttcgccaaaaggcgggagcccgaccgggagaggcttagggcctttctggagaggcttgagtttggcagcctcctccacgagttcggccttctggaaagccccaaggccctggaggaggccccctggcccccgccggaaggggccttcgtgggctttgtgctttcccgcaaggagcccatgtgggccgatcttctggccctggccgccgccagggggggccgggtccaccgggcccccgagccttataaagccctcagggacctgaaggaggcgcgggggcttctcgccaaagacctgagcgttctggccctgagggaaggccttggcctcccgcccggcgacgaccccatgctcctcgcctacctcctggacccttccaacaccacccccgagggggtggcccggcgctacggcggggagtggacggaggaggcgggggagcgggccgccctttccgagaggctcttcgccaacctgtgggggaggcttgagggggaggagaggctcctttggctttaccgggaggtggagaggcccctttccgctgtcctggcccacatggaggccacgggggtgcgcctggacgtggcctatctcagggccttgtccctggaggtggccgaggagatcgcccgcctcgaggccgaggtcttccgcctggccggccaccccttcaacctcaactcccgggaccagctggaaagggtcctctttgacgagctagggcttcccgccatcggcaagacggagaagaccggcaagcgctccaccagcgccgccgtcctggaggccctccgcgaggcccaccccatcgtggagaagatcctgcagtaccgggagctcaccaagctgaagagcacctacattgaccccttgccggacctcatccaccccaggacgggccgcctccacacccgcttcaaccagacggccacggccacgggcaggctaagtagctccgatcccaacctccagaacatccccgtccgcaccccgcttgggcagaggatccgccgggccttcatcgccgaggaggggtggctattggtggccctggactatagccagatagagctcagggtgctggcccacctctccggcgacgagaacctgatccgggtcttccaggaggggcgggacatccacacggagaccgccagctggatgttcggcgtcccccgggaggccgtggaccccctgatgcgccgggcggccaagaccatcaacttcggggtcctctacggcatgtcggcccaccgcctctcccaggagctagccatcccttacgaggaggcccaggccttcattgagcgctactttcagagcttccccaaggtgcgggcctggattgagaagaccctggaggagggcaggaggcgggggtacgtggagaccctcttcggccgccgccgctacgtgccagacatggaggcccgggtgaagagcgtgcgggaggcggccgagcgcatggccttcaacatgcccgtccagggcaccgccgccgacctcatgaagctggctatggtgaagctcttccccaggctggaggaaatgggggccaggatgctccttcaggtccacgacgagctggtcctcgaggccccaaaagagagggcggaggccgtggcccggctggccaaggaggtcatggagggggtgtatcccctggccgtgcccctggaggtggaggtggggataggggaggactggctctccgccaaggagtgataccaccccatgctggcccaagccagcatgggggccccggcaaaaggtttctggggaagttaccaggcatggtgggccgaaggaaacaggaaacaagggtatgagggttttttgccctaaagaaaggccagggggtcctcccgaaggaaggcttccagggggataccccctgggcccaggagtagcccctttcctccaaaggcctgggtgaaggcttttagccctttggtcctttgggaaggggcgcttttgacctccaaagccagaaggcgccttcccttcttcaagacgaagtcaacctcctggtccctttcccgccagtagtacacctcaaagcccccgtgggggccgtgggccagaaggtgggcgcccacggcggtttccacgagccgccccatgagggcggcgtccgcccacacctcctttggggaaagccccaagaccgccgtgatgagccccgtattaagggccaggagcttggggctcgaggcgcggcgccggaagggctcggcggcgtacttctgcag

SEQ ID NO: 3295 - DNA, 3026 bp, Artificial Sequence
  Description of Artificial Sequence: Synthetic DNA sequence of Thermus aquaticus DNA Polymerase L733T
atgagggggatgctgcccctctttgagcccaagggccgggtcctcctggtggacggccaccacctggcctaccgcaccttccacgccctgaagggcctcaccaccagccggggggagccggtgcaggcggtctacggcttcgccaagagcctcctcaaggccctcaaggaggacggggacgcggtgatcgtggtctttgacgccaaggccccctccttccgccacgaggcctacggggggtacaaggcgggccgggcccccacgccggaggactttccccggcaactcgccctcatcaaggagctggtggacctcctggggctggcgcgcctcgaggtcccgggctacgaggcggacgacgtcctggccagcctggccaagaaggcggaaaaggagggctacgaggtccgcatcctcaccgccgacaaagacctttaccagctcctttccgaccgcatccacgccctccaccccgaggggtacctcatcaccccggcctggctttgggaaaagtacggcctgaggcccgaccagtgggccgactaccgggccctgaccggggacgagtccgacaaccttcccggggtcaagggcatcggggagaagacggcgaggaagcttctggaggagtgggggagcctggaagccctcctcaagaacctggaccggctgaagcccgccatccgggagaagatcctggcccacatggacgatctgaagctctcctgggacctggccaaggtgcgcaccgacctgcccctggaggtggacttcgccaaaaggcgggagcccgaccgggagaggcttagggcctttctggagaggcttgagtttggcagcctcctccacgagttcggccttctggaaagccccaaggccctggaggaggccccctggcccccgccggaaggggccttcgtgggctttgtgctttcccgcaaggagcccatgtgggccgatcttctggccctggccgccgccagggggggccgggtccaccgggcccccgagccttataaagccctcagggacctgaaggaggcgcgggggcttctcgccaaagacctgagcgttctggccctgagggaaggccttggcctcccgcccggcgacgaccccatgctcctcgcctacctcctggacccttccaacaccacccccgagggggtggcccggcgctacggcggggagtggacggaggaggcgggggagcgggccgccctttccgagaggctcttcgccaacctgtgggggaggcttgagggggaggagaggctcctttggctttaccgggaggtggagaggcccctttccgctgtcctggcccacatggaggccacgggggtgcgcctggacgtggcctatctcagggccttgtccctggaggtggccgaggagatcgcccgcctcgaggccgaggtcttccgcctggccggccaccccttcaacctcaactcccgggaccagctggaaagggtcctctttgacgagctagggcttcccgccatcggcaagacggagaagaccggcaagcgctccaccagcgccgccgtcctggaggccctccgcgaggcccaccccatcgtggagaagatcctgcagtaccgggagctcaccaagctgaagagcacctacattgaccccttgccggacctcatccaccccaggacgggccgcctccacacccgcttcaaccagacggccacggccacgggcaggctaagtagctccgatcccaacctccagaacatccccgtccgcaccccgcttgggcagaggatccgccgggccttcatcgccgaggaggggtggctattggtggccctggactatagccagatagagctcagggtgctggcccacctctccggcgacgagaacctgatccgggtcttccaggaggggcgggacatccacacggagaccgccagctggatgttcggcgtcccccgggaggccgtggaccccctgatgcgccgggcggccaagaccatcaacttcggggtcctctacggcatgtcggcccaccgcctctcccaggagctagccatcccttacgaggaggcccaggccttcattgagcgctactttcagagcttccccaaggtgcgggcctggattgagaagaccctggaggagggcaggaggcgggggtacgtggagaccctcttcggccgccgccgctacgtgccagacactgaggcccgggtgaagagcgtgcgggaggcggccgagcgcatggccttcaacatgcccgtccagggcaccgccgccgacctcatgaagctggctatggtgaagctcttccccaggctggaggaaatgggggccaggatgctccttcaggtccacgacgagctggtcctcgaggccccaaaagagagggcggaggccgtggcccggctggccaaggaggtcatggagggggtgtatcccctggccgtgcccctggaggtggaggtggggataggggaggactggctctccgccaaggagtgataccaccccatgctggcccaagccagcatgggggccccggcaaaaggtttctggggaagttaccaggcatggtgggccgaaggaaacaggaaacaagggtatgagggttttttgccctaaagaaaggccagggggtcctcccgaaggaaggcttccagggggataccccctgggcccaggagtagcccctttcctccaaaggcctgggtgaaggcttttagccctttggtcctttgggaaggggcgcttttgacctccaaagccagaaggcgccttcccttcttcaagacgaagtcaacctcctggtccctttcccgccagtagtacacctcaaagcccccgtgggggccgtgggccagaaggtgggcgcccacggcggtttccacgagccgccccatgagggcggcgtccgcccacacctcctttggggaaagccccaagaccgccgtgatgagccccgtattaagggccaggagcttggggctcgaggcgcggcgccggaagggctcggcggcgtacttctgcag

SEQ ID NO: 3296 - DNA, 3026 bp, Artificial Sequence
  Description of Artificial Sequence: Synthetic DNA sequence of Thermus aquaticus DNA Polymerase L733N
atgagggggatgctgcccctctttgagcccaagggccgggtcctcctggtggacggccaccacctggcctaccgcaccttccacgccctgaagggcctcaccaccagccggggggagccggtgcaggcggtctacggcttcgccaagagcctcctcaaggccctcaaggaggacggggacgcggtgatcgtggtctttgacgccaaggccccctccttccgccacgaggcctacggggggtacaaggcgggccgggcccccacgccggaggactttccccggcaactcgccctcatcaaggagctggtggacctcctggggctggcgcgcctcgaggtcccgggctacgaggcggacgacgtcctggccagcctggccaagaaggcggaaaaggagggctacgaggtccgcatcctcaccgccgacaaagacctttaccagctcctttccgaccgcatccacgccctccaccccgaggggtacctcatcaccccggcctggctttgggaaaagtacggcctgaggcccgaccagtgggccgactaccgggccctgaccggggacgagtccgacaaccttcccggggtcaagggcatcggggagaagacggcgaggaagcttctggaggagtgggggagcctggaagccctcctcaagaacctggaccggctgaagcccgccatccgggagaagatcctggcccacatggacgatctgaagctctcctgggacctggccaaggtgcgcaccgacctgcccctggaggtggacttcgccaaaaggcgggagcccgaccgggagaggcttagggcctttctggagaggcttgagtttggcagcctcctccacgagttcggccttctggaaagccccaaggccctggaggaggccccctggcccccgccggaaggggccttcgtgggctttgtgctttcccgcaaggagcccatgtgggccgatcttctggccctggccgccgccagggggggccgggtccaccgggcccccgagccttataaagccctcagggacctgaaggaggcgcgggggcttctcgccaaagacctgagcgttctggccctgagggaaggccttggcctcccgcccggcgacgaccccatgctcctcgcctacctcctggacccttccaacaccacccccgagggggtggcccggcgctacggcggggagtggacggaggaggcgggggagcgggccgccctttccgagaggctcttcgccaacctgtgggggaggcttgagggggaggagaggctcctttggctttaccgggaggtggagaggcccctttccgctgtcctggcccacatggaggccacgggggtgcgcctggacgtggcctatctcagggccttgtccctggaggtggccgaggagatcgcccgcctcgaggccgaggtcttccgcctggccggccaccccttcaacctcaactcccgggaccagctggaaagggtcctctttgacgagctagggcttcccgccatcggcaagacggagaagaccggcaagcgctccaccagcgccgccgtcctggaggccctccgcgaggcccaccccatcgtggagaagatcctgcagtaccgggagctcaccaagctgaagagcacctacattgaccccttgccggacctcatccaccccaggacgggccgcctccacacccgcttcaaccagacggccacggccacgggcaggctaagtagctccgatcccaacctccagaacatccccgtccgcaccccgcttgggcagaggatccgccgggccttcatcgccgaggaggggtggctattggtggccctggactatagccagatagagctcagggtgctggcccacctctccggcgacgagaacctgatccgggtcttccaggaggggcgggacatccacacggagaccgccagctggatgttcggcgtcccccgggaggccgtggaccccctgatgcgccgggcggccaagaccatcaacttcggggtcctctacggcatgtcggcccaccgcctctcccaggagctagccatcccttacgaggaggcccaggccttcattgagcgctactttcagagcttccccaaggtgcgggcctggattgagaagaccctggaggagggcaggaggcgggggtacgtggagaccctcttcggccgccgccgctacgtgccagacaatgaggcccgggtgaagagcgtgcgggaggcggccgagcgcatggccttcaacatgcccgtccagggcaccgccgccgacctcatgaagctggctatggtgaagctcttccccaggctggaggaaatgggggccaggatgctccttcaggtccacgacgagctggtcctcgaggccccaaaagagagggcggaggccgtggcccggctggccaaggaggtcatggagggggtgtatcccctggccgtgcccctggaggtggaggtggggataggggaggactggctctccgccaaggagtgataccaccccatgctggcccaagccagcatgggggccccggcaaaaggtttctggggaagttaccaggcatggtgggccgaaggaaacaggaaacaagggtatgagggttttttgccctaaagaaaggccagggggtcctcccgaaggaaggcttccagggggataccccctgggcccaggagtagcccctttcctccaaaggcctgggtgaaggcttttagccctttggtcctttgggaaggggcgcttttgacctccaaagccagaaggcgccttcccttcttcaagacgaagtcaacctcctggtccctttcccgccagtagtacacctcaaagcccccgtgggggccgtgggccagaaggtgggcgcccacggcggtttccacgagccgccccatgagggcggcgtccgcccacacctcctttggggaaagccccaagaccgccgtgatgagccccgtattaagggccaggagcttggggctcgaggcgcggcgccggaagggctcggcggcgtacttctgcag

SEQ ID NO: 3297 - DNA, 3026 bp, Artificial Sequence
  Description of Artificial Sequence: Synthetic DNA sequence of Thermus aquaticus DNA Polymerase L733V
atgagggggatgctgcccctctttgagcccaagggccgggtcctcctggtggacggccaccacctggcctaccgcaccttccacgccctgaagggcctcaccaccagccggggggagccggtgcaggcggtctacggcttcgccaagagcctcctcaaggccctcaaggaggacggggacgcggtgatcgtggtctttgacgccaaggccccctccttccgccacgaggcctacggggggtacaaggcgggccgggcccccacgccggaggactttccccggcaactcgccctcatcaaggagctggtggacctcctggggctggcgcgcctcgaggtcccgggctacgaggcggacgacgtcctggccagcctggccaagaaggcggaaaaggagggctacgaggtccgcatcctcaccgccgacaaagacctttaccagctcctttccgaccgcatccacgccctccaccccgaggggtacctcatcaccccggcctggctttgggaaaagtacggcctgaggcccgaccagtgggccgactaccgggccctgaccggggacgagtccgacaaccttcccggggtcaagggcatcggggagaagacggcgaggaagcttctggaggagtgggggagcctggaagccctcctcaagaacctggaccggctgaagcccgccatccgggagaagatcctggcccacatggacgatctgaagctctcctgggacctggccaaggtgcgcaccgacctgcccctggaggtggacttcgccaaaaggcgggagcccgaccgggagaggcttagggcctttctggagaggcttgagtttggcagcctcctccacgagttcggccttctggaaagccccaaggccctggaggaggccccctggcccccgccggaaggggccttcgtgggctttgtgctttcccgcaaggagcccatgtgggccgatcttctggccctggccgccgccagggggggccgggtccaccgggcccccgagccttataaagccctcagggacctgaaggaggcgcgggggcttctcgccaaagacctgagcgttctggccctgagggaaggccttggcctcccgcccggcgacgaccccatgctcctcgcctacctcctggacccttccaacaccacccccgagggggtggcccggcgctacggcggggagtggacggaggaggcgggggagcgggccgccctttccgagaggctcttcgccaacctgtgggggaggcttgagggggaggagaggctcctttggctttaccgggaggtggagaggcccctttccgctgtcctggcccacatggaggccacgggggtgcgcctggacgtggcctatctcagggccttgtccctggaggtggccgaggagatcgcccgcctcgaggccgaggtcttccgcctggccggccaccccttcaacctcaactcccgggaccagctggaaagggtcctctttgacgagctagggcttcccgccatcggcaagacggagaagaccggcaagcgctccaccagcgccgccgtcctggaggccctccgcgaggcccaccccatcgtggagaagatcctgcagtaccgggagctcaccaagctgaagagcacctacattgaccccttgccggacctcatccaccccaggacgggccgcctccacacccgcttcaaccagacggccacggccacgggcaggctaagtagctccgatcccaacctccagaacatccccgtccgcaccccgcttgggcagaggatccgccgggccttcatcgccgaggaggggtggctattggtggccctggactatagccagatagagctcagggtgctggcccacctctccggcgacgagaacctgatccgggtcttccaggaggggcgggacatccacacggagaccgccagctggatgttcggcgtcccccgggaggccgtggaccccctgatgcgccgggcggccaagaccatcaacttcggggtcctctacggcatgtcggcccaccgcctctcccaggagctagccatcccttacgaggaggcccaggccttcattgagcgctactttcagagcttccccaaggtgcgggcctggattgagaagaccctggaggagggcaggaggcgggggtacgtggagaccctcttcggccgccgccgctacgtgccagacgtcgaggcccgggtgaagagcgtgcgggaggcggccgagcgcatggccttcaacatgcccgtccagggcaccgccgccgacctcatgaagctggctatggtgaagctcttccccaggctggaggaaatgggggccaggatgctccttcaggtccacgacgagctggtcctcgaggccccaaaagagagggcggaggccgtggcccggctggccaaggaggtcatggagggggtgtatcccctggccgtgcccctggaggtggaggtggggataggggaggactggctctccgccaaggagtgataccaccccatgctggcccaagccagcatgggggccccggcaaaaggtttctggggaagttaccaggcatggtgggccgaaggaaacaggaaacaagggtatgagggttttttgccctaaagaaaggccagggggtcctcccgaaggaaggcttccagggggataccccctgggcccaggagtagcccctttcctccaaaggcctgggtgaaggcttttagccctttggtcctttgggaaggggcgcttttgacctccaaagccagaaggcgccttcccttcttcaagacgaagtcaacctcctggtccctttcccgccagtagtacacctcaaagcccccgtgggggccgtgggccagaaggtgggcgcccacggcggtttccacgagccgccccatgagggcggcgtccgcccacacctcctttggggaaagccccaagaccgccgtgatgagccccgtattaagggccaggagcttggggctcgaggcgcggcgccggaagggctcggcggcgtacttctgcag

SEQ ID NO: 3298 - DNA, 3026 bp, Artificial Sequence
  Description of Artificial Sequence: Synthetic DNA sequence of Thermus aquaticus DNA Polymerase E734A
atgagggggatgctgcccctctttgagcccaagggccgggtcctcctggtggacggccaccacctggcctaccgcaccttccacgccctgaagggcctcaccaccagccggggggagccggtgcaggcggtctacggcttcgccaagagcctcctcaaggccctcaaggaggacggggacgcggtgatcgtggtctttgacgccaaggccccctccttccgccacgaggcctacggggggtacaaggcgggccgggcccccacgccggaggactttccccggcaactcgccctcatcaaggagctggtggacctcctggggctggcgcgcctcgaggtcccgggctacgaggcggacgacgtcctggccagcctggccaagaaggcggaaaaggagggctacgaggtccgcatcctcaccgccgacaaagacctttaccagctcctttccgaccgcatccacgccctccaccccgaggggtacctcatcaccccggcctggctttgggaaaagtacggcctgaggcccgaccagtgggccgactaccgggccctgaccggggacgagtccgacaaccttcccggggtcaagggcatcggggagaagacggcgaggaagcttctggaggagtgggggagcctggaagccctcctcaagaacctggaccggctgaagcccgccatccgggagaagatcctggcccacatggacgatctgaagctctcctgggacctggccaaggtgcgcaccgacctgcccctggaggtggacttcgccaaaaggcgggagcccgaccgggagaggcttagggcctttctggagaggcttgagtttggcagcctcctccacgagttcggccttctggaaagccccaaggccctggaggaggccccctggcccccgccggaaggggccttcgtgggctttgtgctttcccgcaaggagcccatgtgggccgatcttctggccctggccgccgccagggggggccgggtccaccgggcccccgagccttataaagccctcagggacctgaaggaggcgcgggggcttctcgccaaagacctgagcgttctggccctgagggaaggccttggcctcccgcccggcgacgaccccatgctcctcgcctacctcctggacccttccaacaccacccccgagggggtggcccggcgctacggcggggagtggacggaggaggcgggggagcgggccgccctttccgagaggctcttcgccaacctgtgggggaggcttgagggggaggagaggctcctttggctttaccgggaggtggagaggcccctttccgctgtcctggcccacatggaggccacgggggtgcgcctggacgtggcctatctcagggccttgtccctggaggtggccgaggagatcgcccgcctcgaggccgaggtcttccgcctggccggccaccccttcaacctcaactcccgggaccagctggaaagggtcctctttgacgagctagggcttcccgccatcggcaagacggagaagaccggcaagcgctccaccagcgccgccgtcctggaggccctccgcgaggcccaccccatcgtggagaagatcctgcagtaccgggagctcaccaagctgaagagcacctacattgaccccttgccggacctcatccaccccaggacgggccgcctccacacccgcttcaaccagacggccacggccacgggcaggctaagtagctccgatcccaacctccagaacatccccgtccgcaccccgcttgggcagaggatccgccgggccttcatcgccgaggaggggtggctattggtggccctggactatagccagatagagctcagggtgctggcccacctctccggcgacgagaacctgatccgggtcttccaggaggggcgggacatccacacggagaccgccagctggatgttcggcgtcccccgggaggccgtggaccccctgatgcgccgggcggccaagaccatcaacttcggggtcctctacggcatgtcggcccaccgcctctcccaggagctagccatcccttacgaggaggcccaggccttcattgagcgctactttcagagcttccccaaggtgcgggcctggattgagaagaccctggaggagggcaggaggcgggggtacgtggagaccctcttcggccgccgccgctacgtgccagacctagctgcccgggtgaagagcgtgcgggaggcggccgagcgcatggccttcaacatgcccgtccagggcaccgccgccgacctcatgaagctggctatggtgaagctcttccccaggctggaggaaatgggggccaggatgctccttcaggtccacgacgagctggtcctcgaggccccaaaagagagggcggaggccgtggcccggctggccaaggaggtcatggagggggtgtatcccctggccgtgcccctggaggtggaggtggggataggggaggactggctctccgccaaggagtgataccaccccatgctggcccaagccagcatgggggccccggcaaaaggtttctggggaagttaccaggcatggtgggccgaaggaaacaggaaacaagggtatgagggttttttgccctaaagaaaggccagggggtcctcccgaaggaaggcttccagggggataccccctgggcccaggagtagcccctttcctccaaaggcctgggtgaaggcttttagccctttggtcctttgggaaggggcgcttttgacctccaaagccagaaggcgccttcccttcttcaagacgaagtcaacctcctggtccctttcccgccagtagtacacctcaaagcccccgtgggggccgtgggccagaaggtgggcgcccacggcggtttccacgagccgccccatgagggcggcgtccgcccacacctcctttggggaaagccccaagaccgccgtgatgagccccgtattaagggccaggagcttggggctcgaggcgcggcgccggaagggctcggcggcgtacttctgcag

SEQ ID NO: 3299 - DNA, 3026 bp, Artificial Sequence
  Description of Artificial Sequence: Synthetic DNA sequence of Thermus aquaticus DNA Polymerase E734R
atgagggggatgctgcccctctttgagcccaagggccgggtcctcctggtggacggccaccacctggcctaccgcaccttccacgccctgaagggcctcaccaccagccggggggagccggtgcaggcggtctacggcttcgccaagagcctcctcaaggccctcaaggaggacggggacgcggtgatcgtggtctttgacgccaaggccccctccttccgccacgaggcctacggggggtacaaggcgggccgggcccccacgccggaggactttccccggcaactcgccctcatcaaggagctggtggacctcctggggctggcgcgcctcgaggtcccgggctacgaggcggacgacgtcctggccagcctggccaagaaggcggaaaaggagggctacgaggtccgcatcctcaccgccgacaaagacctttaccagctcctttccgaccgcatccacgccctccaccccgaggggtacctcatcaccccggcctggctttgggaaaagtacggcctgaggcccgaccagtgggccgactaccgggccctgaccggggacgagtccgacaaccttcccggggtcaagggcatcggggagaagacggcgaggaagcttctggaggagtgggggagcctggaagccctcctcaagaacctggaccggctgaagcccgccatccgggagaagatcctggcccacatggacgatctgaagctctcctgggacctggccaaggtgcgcaccgacctgcccctggaggtggacttcgccaaaaggcgggagcccgaccgggagaggcttagggcctttctggagaggcttgagtttggcagcctcctccacgagttcggccttctggaaagccccaaggccctggaggaggccccctggcccccgccggaaggggccttcgtgggctttgtgctttcccgcaaggagcccatgtgggccgatcttctggccctggccgccgccagggggggccgggtccaccgggcccccgagccttataaagccctcagggacctgaaggaggcgcgggggcttctcgccaaagacctgagcgttctggccctgagggaaggccttggcctcccgcccggcgacgaccccatgctcctcgcctacctcctggacccttccaacaccacccccgagggggtggcccggcgctacggcggggagtggacggaggaggcgggggagcgggccgccctttccgagaggctcttcgccaacctgtgggggaggcttgagggggaggagaggctcctttggctttaccgggaggtggagaggcccctttccgctgtcctggcccacatggaggccacgggggtgcgcctggacgtggcctatctcagggccttgtccctggaggtggccgaggagatcgcccgcctcgaggccgaggtcttccgcctggccggccaccccttcaacctcaactcccgggaccagctggaaagggtcctctttgacgagctagggcttcccgccatcggcaagacggagaagaccggcaagcgctccaccagcgccgccgtcctggaggccctccgcgaggcccaccccatcgtggagaagatcctgcagtaccgggagctcaccaagctgaagagcacctacattgaccccttgccggacctcatccaccccaggacgggccgcctccacacccgcttcaaccagacggccacggccacgggcaggctaagtagctccgatcccaacctccagaacatccccgtccgcaccccgcttgggcagaggatccgccgggccttcatcgccgaggaggggtggctattggtggccctggactatagccagatagagctcagggtgctggcccacctctccggcgacgagaacctgatccgggtcttccaggaggggcgggacatccacacggagaccgccagctggatgttcggcgtcccccgggaggccgtggaccccctgatgcgccgggcggccaagaccatcaacttcggggtcctctacggcatgtcggcccaccgcctctcccaggagctagccatcccttacgaggaggcccaggccttcattgagcgctactttcagagcttccccaaggtgcgggcctggattgagaagaccctggaggagggcaggaggcgggggtacgtggagaccctcttcggccgccgccgctacgtgccagacctacgagcccgggtgaagagcgtgcgggaggcggccgagcgcatggccttcaacatgcccgtccagggcaccgccgccgacctcatgaagctggctatggtgaagctcttccccaggctggaggaaatgggggccaggatgctccttcaggtccacgacgagctggtcctcgaggccccaaaagagagggcggaggccgtggcccggctggccaaggaggtcatggagggggtgtatcccctggccgtgcccctggaggtggaggtggggataggggaggactggctctccgccaaggagtgataccaccccatgctggcccaagccagcatgggggccccggcaaaaggtttctggggaagttaccaggcatggtgggccgaaggaaacaggaaacaagggtatgagggttttttgccctaaagaaaggccagggggtcctcccgaaggaaggcttccagggggataccccctgggcccaggagtagcccctttcctccaaaggcctgggtgaaggcttttagccctttggtcctttgggaaggggcgcttttgacctccaaagccagaaggcgccttcccttcttcaagacgaagtcaacctcctggtccctttcccgccagtagtacacctcaaagcccccgtgggggccgtgggccagaaggtgggcgcccacggcggtttccacgagccgccccatgagggcggcgtccgcccacacctcctttggggaaagccccaagaccgccgtgatgagccccgtattaagggccaggagcttggggctcgaggcgcggcgccggaagggctcggcggcgtacttctgcag

SEQ ID NO: 3300 - DNA, 3026 bp, Artificial Sequence
  Description of Artificial Sequence: Synthetic DNA sequence of Thermus aquaticus DNA Polymerase E734C
atgagggggatgctgcccctctttgagcccaagggccgggtcctcctggtggacggccaccacctggcctaccgcaccttccacgccctgaagggcctcaccaccagccggggggagccggtgcaggcggtctacggcttcgccaagagcctcctcaaggccctcaaggaggacggggacgcggtgatcgtggtctttgacgccaaggccccctccttccgccacgaggcctacggggggtacaaggcgggccgggcccccacgccggaggactttccccggcaactcgccctcatcaaggagctggtggacctcctggggctggcgcgcctcgaggtcccgggctacgaggcggacgacgtcctggccagcctggccaagaaggcggaaaaggagggctacgaggtccgcatcctcaccgccgacaaagacctttaccagctcctttccgaccgcatccacgccctccaccccgaggggtacctcatcaccccggcctggctttgggaaaagtacggcctgaggcccgaccagtgggccgactaccgggccctgaccggggacgagtccgacaaccttcccggggtcaagggcatcggggagaagacggcgaggaagcttctggaggagtgggggagcctggaagccctcctcaagaacctggaccggctgaagcccgccatccgggagaagatcctggcccacatggacgatctgaagctctcctgggacctggccaaggtgcgcaccgacctgcccctggaggtggacttcgccaaaaggcgggagcccgaccgggagaggcttagggcctttctggagaggcttgagtttggcagcctcctccacgagttcggccttctggaaagccccaaggccctggaggaggccccctggcccccgccggaaggggccttcgtgggctttgtgctttcccgcaaggagcccatgtgggccgatcttctggccctggccgccgccagggggggccgggtccaccgggcccccgagccttataaagccctcagggacctgaaggaggcgcgggggcttctcgccaaagacctgagcgttctggccctgagggaaggccttggcctcccgcccggcgacgaccccatgctcctcgcctacctcctggacccttccaacaccacccccgagggggtggcccggcgctacggcggggagtggacggaggaggcgggggagcgggccgccctttccgagaggctcttcgccaacctgtgggggaggcttgagggggaggagaggctcctttggctttaccgggaggtggagaggcccctttccgctgtcctggcccacatggaggccacgggggtgcgcctggacgtggcctatctcagggccttgtccctggaggtggccgaggagatcgcccgcctcgaggccgaggtcttccgcctggccggccaccccttcaacctcaactcccgggaccagctggaaagggtcctctttgacgagctagggcttcccgccatcggcaagacggagaagaccggcaagcgctccaccagcgccgccgtcctggaggccctccgcgaggcccaccccatcgtggagaagatcctgcagtaccgggagctcaccaagctgaagagcacctacattgaccccttgccggacctcatccaccccaggacgggccgcctccacacccgcttcaaccagacggccacggccacgggcaggctaagtagctccgatcccaacctccagaacatccccgtccgcaccccgcttgggcagaggatccgccgggccttcatcgccgaggaggggtggctattggtggccctggactatagccagatagagctcagggtgctggcccacctctccggcgacgagaacctgatccgggtcttccaggaggggcgggacatccacacggagaccgccagctggatgttcggcgtcccccgggaggccgtggaccccctgatgcgccgggcggccaagaccatcaacttcggggtcctctacggcatgtcggcccaccgcctctcccaggagctagccatcccttacgaggaggcccaggccttcattgagcgctactttcagagcttccccaaggtgcgggcctggattgagaagaccctggaggagggcaggaggcgggggtacgtggagaccctcttcggccgccgccgctacgtgccagacctatgtgcccgggtgaagagcgtgcgggaggcggccgagcgcatggccttcaacatgcccgtccagggcaccgccgccgacctcatgaagctggctatggtgaagctcttccccaggctggaggaaatgggggccaggatgctccttcaggtccacgacgagctggtcctcgaggccccaaaagagagggcggaggccgtggcccggctggccaaggaggtcatggagggggtgtatcccctggccgtgcccctggaggtggaggtggggataggggaggactggctctccgccaaggagtgataccaccccatgctggcccaagccagcatgggggccccggcaaaaggtttctggggaagttaccaggcatggtgggccgaaggaaacaggaaacaagggtatgagggttttttgccctaaagaaaggccagggggtcctcccgaaggaaggcttccagggggataccccctgggcccaggagtagcccctttcctccaaaggcctgggtgaaggcttttagccctttggtcctttgggaaggggcgcttttgacctccaaagccagaaggcgccttcccttcttcaagacgaagtcaacctcctggtccctttcccgccagtagtacacctcaaagcccccgtgggggccgtgggccagaaggtgggcgcccacggcggtttccacgagccgccccatgagggcggcgtccgcccacacctcctttggggaaagccccaagaccgccgtgatgagccccgtattaagggccaggagcttggggctcgaggcgcggcgccggaagggctcggcggcgtacttctgcag

SEQ ID NO: 3301 - DNA, 3026 bp, Artificial Sequence
  Description of Artificial Sequence: Synthetic DNA sequence of Thermus aquaticus DNA Polymerase E734G
atgagggggatgctgcccctctttgagcccaagggccgggtcctcctggtggacggccaccacctggcctaccgcaccttccacgccctgaagggcctcaccaccagccggggggagccggtgcaggcggtctacggcttcgccaagagcctcctcaaggccctcaaggaggacggggacgcggtgatcgtggtctttgacgccaaggccccctccttccgccacgaggcctacggggggtacaaggcgggccgggcccccacgccggaggactttccccggcaactcgccctcatcaaggagctggtggacctcctggggctggcgcgcctcgaggtcccgggctacgaggcggacgacgtcctggccagcctggccaagaaggcggaaaaggagggctacgaggtccgcatcctcaccgccgacaaagacctttaccagctcctttccgaccgcatccacgccctccaccccgaggggtacctcatcaccccggcctggctttgggaaaagtacggcctgaggcccgaccagtgggccgactaccgggccctgaccggggacgagtccgacaaccttcccggggtcaagggcatcggggagaagacggcgaggaagcttctggaggagtgggggagcctggaagccctcctcaagaacctggaccggctgaagcccgccatccgggagaagatcctggcccacatggacgatctgaagctctcctgggacctggccaaggtgcgcaccgacctgcccctggaggtggacttcgccaaaaggcgggagcccgaccgggagaggcttagggcctttctggagaggcttgagtttggcagcctcctccacgagttcggccttctggaaagccccaaggccctggaggaggccccctggcccccgccggaaggggccttcgtgggctttgtgctttcccgcaaggagcccatgtgggccgatcttctggccctggccgccgccagggggggccgggtccaccgggcccccgagccttataaagccctcagggacctgaaggaggcgcgggggcttctcgccaaagacctgagcgttctggccctgagggaaggccttggcctcccgcccggcgacgaccccatgctcctcgcctacctcctggacccttccaacaccacccccgagggggtggcccggcgctacggcggggagtggacggaggaggcgggggagcgggccgccctttccgagaggctcttcgccaacctgtgggggaggcttgagggggaggagaggctcctttggctttaccgggaggtggagaggcccctttccgctgtcctggcccacatggaggccacgggggtgcgcctggacgtggcctatctcagggccttgtccctggaggtggccgaggagatcgcccgcctcgaggccgaggtcttccgcctggccggccaccccttcaacctcaactcccgggaccagctggaaagggtcctctttgacgagctagggcttcccgccatcggcaagacggagaagaccggcaagcgctccaccagcgccgccgtcctggaggccctccgcgaggcccaccccatcgtggagaagatcctgcagtaccgggagctcaccaagctgaagagcacctacattgaccccttgccggacctcatccaccccaggacgggccgcctccacacccgcttcaaccagacggccacggccacgggcaggctaagtagctccgatcccaacctccagaacatccccgtccgcaccccgcttgggcagaggatccgccgggccttcatcgccgaggaggggtggctattggtggccctggactatagccagatagagctcagggtgctggcccacctctccggcgacgagaacctgatccgggtcttccaggaggggcgggacatccacacggagaccgccagctggatgttcggcgtcccccgggaggccgtggaccccctgatgcgccgggcggccaagaccatcaacttcggggtcctctacggcatgtcggcccaccgcctctcccaggagctagccatcccttacgaggaggcccaggccttcattgagcgctactttcagagcttccccaaggtgcgggcctggattgagaagaccctggaggagggcaggaggcgggggtacgtggagaccctcttcggccgccgccgctacgtgccagacctaggtgcccgggtgaagagcgtgcgggaggcggccgagcgcatggccttcaacatgcccgtccagggcaccgccgccgacctcatgaagctggctatggtgaagctcttccccaggctggaggaaatgggggccaggatgctccttcaggtccacgacgagctggtcctcgaggccccaaaagagagggcggaggccgtggcccggctggccaaggaggtcatggagggggtgtatcccctggccgtgcccctggaggtggaggtggggataggggaggactggctctccgccaaggagtgataccaccccatgctggcccaagccagcatgggggccccggcaaaaggtttctggggaagttaccaggcatggtgggccgaaggaaacaggaaacaagggtatgagggttttttgccctaaagaaaggccagggggtcctcccgaaggaaggcttccagggggataccccctgggcccaggagtagcccctttcctccaaaggcctgggtgaaggcttttagccctttggtcctttgggaaggggcgcttttgacctccaaagccagaaggcgccttcccttcttcaagacgaagtcaacctcctggtccctttcccgccagtagtacacctcaaagcccccgtgggggccgtgggccagaaggtgggcgcccacggcggtttccacgagccgccccatgagggcggcgtccgcccacacctcctttggggaaagccccaagaccgccgtgatgagccccgtattaagggccaggagcttggggctcgaggcgcggcgccggaagggctcggcggcgtacttctgcag

SEQ ID NO: 3302 - DNA, 3026 bp, Artificial Sequence
  Description of Artificial Sequence: Synthetic DNA sequence of Thermus aquaticus DNA Polymerase E734Q
atgagggggatgctgcccctctttgagcccaagggccgggtcctcctggtggacggccaccacctggcctaccgcaccttccacgccctgaagggcctcaccaccagccggggggagccggtgcaggcggtctacggcttcgccaagagcctcctcaaggccctcaaggaggacggggacgcggtgatcgtggtctttgacgccaaggccccctccttccgccacgaggcctacggggggtacaaggcgggccgggcccccacgccggaggactttccccggcaactcgccctcatcaaggagctggtggacctcctggggctggcgcgcctcgaggtcccgggctacgaggcggacgacgtcctggccagcctggccaagaaggcggaaaaggagggctacgaggtccgcatcctcaccgccgacaaagacctttaccagctcctttccgaccgcatccacgccctccaccccgaggggtacctcatcaccccggcctggctttgggaaaagtacggcctgaggcccgaccagtgggccgactaccgggccctgaccggggacgagtccgacaaccttcccggggtcaagggcatcggggagaagacggcgaggaagcttctggaggagtgggggagcctggaagccctcctcaagaacctggaccggctgaagcccgccatccgggagaagatcctggcccacatggacgatctgaagctctcctgggacctggccaaggtgcgcaccgacctgcccctggaggtggacttcgccaaaaggcgggagcccgaccgggagaggcttagggcctttctggagaggcttgagtttggcagcctcctccacgagttcggccttctggaaagccccaaggccctggaggaggccccctggcccccgccggaaggggccttcgtgggctttgtgctttcccgcaaggagcccatgtgggccgatcttctggccctggccgccgccagggggggccgggtccaccgggcccccgagccttataaagccctcagggacctgaaggaggcgcgggggcttctcgccaaagacctgagcgttctggccctgagggaaggccttggcctcccgcccggcgacgaccccatgctcctcgcctacctcctggacccttccaacaccacccccgagggggtggcccggcgctacggcggggagtggacggaggaggcgggggagcgggccgccctttccgagaggctcttcgccaacctgtgggggaggcttgagggggaggagaggctcctttggctttaccgggaggtggagaggcccctttccgctgtcctggcccacatggaggccacgggggtgcgcctggacgtggcctatctcagggccttgtccctggaggtggccgaggagatcgcccgcctcgaggccgaggtcttccgcctggccggccaccccttcaacctcaactcccgggaccagctggaaagggtcctctttgacgagctagggcttcccgccatcggcaagacggagaagaccggcaagcgctccaccagcgccgccgtcctggaggccctccgcgaggcccaccccatcgtggagaagatcctgcagtaccgggagctcaccaagctgaagagcacctacattgaccccttgccggacctcatccaccccaggacgggccgcctccacacccgcttcaaccagacggccacggccacgggcaggctaagtagctccgatcccaacctccagaacatccccgtccgcaccccgcttgggcagaggatccgccgggccttcatcgccgaggaggggtggctattggtggccctggactatagccagatagagctcagggtgctggcccacctctccggcgacgagaacctgatccgggtcttccaggaggggcgggacatccacacggagaccgccagctggatgttcggcgtcccccgggaggccgtggaccccctgatgcgccgggcggccaagaccatcaacttcggggtcctctacggcatgtcggcccaccgcctctcccaggagctagccatcccttacgaggaggcccaggccttcattgagcgctactttcagagcttccccaaggtgcgggcctggattgagaagaccctggaggagggcaggaggcgggggtacgtggagaccctcttcggccgccgccgctacgtgccagacctacaagcccgggtgaagagcgtgcgggaggcggccgagcgcatggccttcaacatgcccgtccagggcaccgccgccgacctcatgaagctggctatggtgaagctcttccccaggctggaggaaatgggggccaggatgctccttcaggtccacgacgagctggtcctcgaggccccaaaagagagggcggaggccgtggcccggctggccaaggaggtcatggagggggtgtatcccctggccgtgcccctggaggtggaggtggggataggggaggactggctctccgccaaggagtgataccaccccatgctggcccaagccagcatgggggccccggcaaaaggtttctggggaagttaccaggcatggtgggccgaaggaaacaggaaacaagggtatgagggttttttgccctaaagaaaggccagggggtcctcccgaaggaaggcttccagggggataccccctgggcccaggagtagcccctttcctccaaaggcctgggtgaaggcttttagccctttggtcctttgggaaggggcgcttttgacctccaaagccagaaggcgccttcccttcttcaagacgaagtcaacctcctggtccctttcccgccagtagtacacctcaaagcccccgtgggggccgtgggccagaaggtgggcgcccacggcggtttccacgagccgccccatgagggcggcgtccgcccacacctcctttggggaaagccccaagaccgccgtgatgagccccgtattaagggccaggagcttggggctcgaggcgcggcgccggaagggctcggcggcgtacttctgcag

SEQ ID NO: 3303 - DNA, 3026 bp, Artificial Sequence
  Description of Artificial Sequence: Synthetic DNA sequence of Thermus aquaticus DNA Polymerase E734H
atgagggggatgctgcccctctttgagcccaagggccgggtcctcctggtggacggccaccacctggcctaccgcaccttccacgccctgaagggcctcaccaccagccggggggagccggtgcaggcggtctacggcttcgccaagagcctcctcaaggccctcaaggaggacggggacgcggtgatcgtggtctttgacgccaaggccccctccttccgccacgaggcctacggggggtacaaggcgggccgggcccccacgccggaggactttccccggcaactcgccctcatcaaggagctggtggacctcctggggctggcgcgcctcgaggtcccgggctacgaggcggacgacgtcctggccagcctggccaagaaggcggaaaaggagggctacgaggtccgcatcctcaccgccgacaaagacctttaccagctcctttccgaccgcatccacgccctccaccccgaggggtacctcatcaccccggcctggctttgggaaaagtacggcctgaggcccgaccagtgggccgactaccgggccctgaccggggacgagtccgacaaccttcccggggtcaagggcatcggggagaagacggcgaggaagcttctggaggagtgggggagcctggaagccctcctcaagaacctggaccggctgaagcccgccatccgggagaagatcctggcccacatggacgatctgaagctctcctgggacctggccaaggtgcgcaccgacctgcccctggaggtggacttcgccaaaaggcgggagcccgaccgggagaggcttagggcctttctggagaggcttgagtttggcagcctcctccacgagttcggccttctggaaagccccaaggccctggaggaggccccctggcccccgccggaaggggccttcgtgggctttgtgctttcccgcaaggagcccatgtgggccgatcttctggccctggccgccgccagggggggccgggtccaccgggcccccgagccttataaagccctcagggacctgaaggaggcgcgggggcttctcgccaaagacctgagcgttctggccctgagggaaggccttggcctcccgcccggcgacgaccccatgctcctcgcctacctcctggacccttccaacaccacccccgagggggtggcccggcgctacggcggggagtggacggaggaggcgggggagcgggccgccctttccgagaggctcttcgccaacctgtgggggaggcttgagggggaggagaggctcctttggctttaccgggaggtggagaggcccctttccgctgtcctggcccacatggaggccacgggggtgcgcctggacgtggcctatctcagggccttgtccctggaggtggccgaggagatcgcccgcctcgaggccgaggtcttccgcctggccggccaccccttcaacctcaactcccgggaccagctggaaagggtcctctttgacgagctagggcttcccgccatcggcaagacggagaagaccggcaagcgctccaccagcgccgccgtcctggaggccctccgcgaggcccaccccatcgtggagaagatcctgcagtaccgggagctcaccaagctgaagagcacctacattgaccccttgccggacctcatccaccccaggacgggccgcctccacacccgcttcaaccagacggccacggccacgggcaggctaagtagctccgatcccaacctccagaacatccccgtccgcaccccgcttgggcagaggatccgccgggccttcatcgccgaggaggggtggctattggtggccctggactatagccagatagagctcagggtgctggcccacctctccggcgacgagaacctgatccgggtcttccaggaggggcgggacatccacacggagaccgccagctggatgttcggcgtcccccgggaggccgtggaccccctgatgcgccgggcggccaagaccatcaacttcggggtcctctacggcatgtcggcccaccgcctctcccaggagctagccatcccttacgaggaggcccaggccttcattgagcgctactttcagagcttccccaaggtgcgggcctggattgagaagaccctggaggagggcaggaggcgggggtacgtggagaccctcttcggccgccgccgctacgtgccagacctacatgcccgggtgaagagcgtgcgggaggcggccgagcgcatggccttcaacatgcccgtccagggcaccgccgccgacctcatgaagctggctatggtgaagctcttccccaggctggaggaaatgggggccaggatgctccttcaggtccacgacgagctggtcctcgaggccccaaaagagagggcggaggccgtggcccggctggccaaggaggtcatggagggggtgtatcccctggccgtgcccctggaggtggaggtggggataggggaggactggctctccgccaaggagtgataccaccccatgctggcccaagccagcatgggggccccggcaaaaggtttctggggaagttaccaggcatggtgggccgaaggaaacaggaaacaagggtatgagggttttttgccctaaagaaaggccagggggtcctcccgaaggaaggcttccagggggataccccctgggcccaggagtagcccctttcctccaaaggcctgggtgaaggcttttagccctttggtcctttgggaaggggcgcttttgacctccaaagccagaaggcgccttcccttcttcaagacgaagtcaacctcctggtccctttcccgccagtagtacacctcaaagcccccgtgggggccgtgggccagaaggtgggcgcccacggcggtttccacgagccgccccatgagggcggcgtccgcccacacctcctttggggaaagccccaagaccgccgtgatgagccccgtattaagggccaggagcttggggctcgaggcgcggcgccggaagggctcggcggcgtacttctgcag

SEQ ID NO: 3304 - DNA, 3026 bp, Artificial Sequence
  Description of Artificial Sequence: Synthetic DNA sequence of Thermus aquaticus DNA Polymerase E734I
atgagggggatgctgcccctctttgagcccaagggccgggtcctcctggtggacggccaccacctggcctaccgcaccttccacgccctgaagggcctcaccaccagccggggggagccggtgcaggcggtctacggcttcgccaagagcctcctcaaggccctcaaggaggacggggacgcggtgatcgtggtctttgacgccaaggccccctccttccgccacgaggcctacggggggtacaaggcgggccgggcccccacgccggaggactttccccggcaactcgccctcatcaaggagctggtggacctcctggggctggcgcgcctcgaggtcccgggctacgaggcggacgacgtcctggccagcctggccaagaaggcggaaaaggagggctacgaggtccgcatcctcaccgccgacaaagacctttaccagctcctttccgaccgcatccacgccctccaccccgaggggtacctcatcaccccggcctggctttgggaaaagtacggcctgaggcccgaccagtgggccgactaccgggccctgaccggggacgagtccgacaaccttcccggggtcaagggcatcggggagaagacggcgaggaagcttctggaggagtgggggagcctggaagccctcctcaagaacctggaccggctgaagcccgccatccgggagaagatcctggcccacatggacgatctgaagctctcctgggacctggccaaggtgcgcaccgacctgcccctggaggtggacttcgccaaaaggcgggagcccgaccgggagaggcttagggcctttctggagaggcttgagtttggcagcctcctccacgagttcggccttctggaaagccccaaggccctggaggaggccccctggcccccgccggaaggggccttcgtgggctttgtgctttcccgcaaggagcccatgtgggccgatcttctggccctggccgccgccagggggggccgggtccaccgggcccccgagccttataaagccctcagggacctgaaggaggcgcgggggcttctcgccaaagacctgagcgttctggccctgagggaaggccttggcctcccgcccggcgacgaccccatgctcctcgcctacctcctggacccttccaacaccacccccgagggggtggcccggcgctacggcggggagtggacggaggaggcgggggagcgggccgccctttccgagaggctcttcgccaacctgtgggggaggcttgagggggaggagaggctcctttggctttaccgggaggtggagaggcccctttccgctgtcctggcccacatggaggccacgggggtgcgcctggacgtggcctatctcagggccttgtccctggaggtggccgaggagatcgcccgcctcgaggccgaggtcttccgcctggccggccaccccttcaacctcaactcccgggaccagctggaaagggtcctctttgacgagctagggcttcccgccatcggcaagacggagaagaccggcaagcgctccaccagcgccgccgtcctggaggccctccgcgaggcccaccccatcgtggagaagatcctgcagtaccgggagctcaccaagctgaagagcacctacattgaccccttgccggacctcatccaccccaggacgggccgcctccacacccgcttcaaccagacggccacggccacgggcaggctaagtagctccgatcccaacctccagaacatccccgtccgcaccccgcttgggcagaggatccgccgggccttcatcgccgaggaggggtggctattggtggccctggactatagccagatagagctcagggtgctggcccacctctccggcgacgagaacctgatccgggtcttccaggaggggcgggacatccacacggagaccgccagctggatgttcggcgtcccccgggaggccgtggaccccctgatgcgccgggcggccaagaccatcaacttcggggtcctctacggcatgtcggcccaccgcctctcccaggagctagccatcccttacgaggaggcccaggccttcattgagcgctactttcagagcttccccaaggtgcgggcctggattgagaagaccctggaggagggcaggaggcgggggtacgtggagaccctcttcggccgccgccgctacgtgccagacctaattgcccgggtgaagagcgtgcgggaggcggccgagcgcatggccttcaacatgcccgtccagggcaccgccgccgacctcatgaagctggctatggtgaagctcttccccaggctggaggaaatgggggccaggatgctccttcaggtccacgacgagctggtcctcgaggccccaaaagagagggcggaggccgtggcccggctggccaaggaggtcatggagggggtgtatcccctggccgtgcccctggaggtggaggtggggataggggaggactggctctccgccaaggagtgataccaccccatgctggcccaagccagcatgggggccccggcaaaaggtttctggggaagttaccaggcatggtgggccgaaggaaacaggaaacaagggtatgagggttttttgccctaaagaaaggccagggggtcctcccgaaggaaggcttccagggggataccccctgggcccaggagtagcccctttcctccaaaggcctgggtgaaggcttttagccctttggtcctttgggaaggggcgcttttgacctccaaagccagaaggcgccttcccttcttcaagacgaagtcaacctcctggtccctttcccgccagtagtacacctcaaagcccccgtgggggccgtgggccagaaggtgggcgcccacggcggtttccacgagccgccccatgagggcggcgtccgcccacacctcctttggggaaagccccaagaccgccgtgatgagccccgtattaagggccaggagcttggggctcgaggcgcggcgccggaagggctcggcggcgtacttctgcag

SEQ ID NO: 3305 - DNA, 3026 bp, Artificial Sequence
  Description of Artificial Sequence: Synthetic DNA sequence of Thermus aquaticus DNA Polymerase E734L
atgagggggatgctgcccctctttgagcccaagggccgggtcctcctggtggacggccaccacctggcctaccgcaccttccacgccctgaagggcctcaccaccagccggggggagccggtgcaggcggtctacggcttcgccaagagcctcctcaaggccctcaaggaggacggggacgcggtgatcgtggtctttgacgccaaggccccctccttccgccacgaggcctacggggggtacaaggcgggccgggcccccacgccggaggactttccccggcaactcgccctcatcaaggagctggtggacctcctggggctggcgcgcctcgaggtcccgggctacgaggcggacgacgtcctggccagcctggccaagaaggcggaaaaggagggctacgaggtccgcatcctcaccgccgacaaagacctttaccagctcctttccgaccgcatccacgccctccaccccgaggggtacctcatcaccccggcctggctttgggaaaagtacggcctgaggcccgaccagtgggccgactaccgggccctgaccggggacgagtccgacaaccttcccggggtcaagggcatcggggagaagacggcgaggaagcttctggaggagtgggggagcctggaagccctcctcaagaacctggaccggctgaagcccgccatccgggagaagatcctggcccacatggacgatctgaagctctcctgggacctggccaaggtgcgcaccgacctgcccctggaggtggacttcgccaaaaggcgggagcccgaccgggagaggcttagggcctttctggagaggcttgagtttggcagcctcctccacgagttcggccttctggaaagccccaaggccctggaggaggccccctggcccccgccggaaggggccttcgtgggctttgtgctttcccgcaaggagcccatgtgggccgatcttctggccctggccgccgccagggggggccgggtccaccgggcccccgagccttataaagccctcagggacctgaaggaggcgcgggggcttctcgccaaagacctgagcgttctggccctgagggaaggccttggcctcccgcccggcgacgaccccatgctcctcgcctacctcctggacccttccaacaccacccccgagggggtggcccggcgctacggcggggagtggacggaggaggcgggggagcgggccgccctttccgagaggctcttcgccaacctgtgggggaggcttgagggggaggagaggctcctttggctttaccgggaggtggagaggcccctttccgctgtcctggcccacatggaggccacgggggtgcgcctggacgtggcctatctcagggccttgtccctggaggtggccgaggagatcgcccgcctcgaggccgaggtcttccgcctggccggccaccccttcaacctcaactcccgggaccagctggaaagggtcctctttgacgagctagggcttcccgccatcggcaagacggagaagaccggcaagcgctccaccagcgccgccgtcctggaggccctccgcgaggcccaccccatcgtggagaagatcctgcagtaccgggagctcaccaagctgaagagcacctacattgaccccttgccggacctcatccaccccaggacgggccgcctccacacccgcttcaaccagacggccacggccacgggcaggctaagtagctccgatcccaacctccagaacatccccgtccgcaccccgcttgggcagaggatccgccgggccttcatcgccgaggaggggtggctattggtggccctggactatagccagatagagctcagggtgctggcccacctctccggcgacgagaacctgatccgggtcttccaggaggggcgggacatccacacggagaccgccagctggatgttcggcgtcccccgggaggccgtggaccccctgatgcgccgggcggccaagaccatcaacttcggggtcctctacggcatgtcggcccaccgcctctcccaggagctagccatcccttacgaggaggcccaggccttcattgagcgctactttcagagcttccccaaggtgcgggcctggattgagaagaccctggaggagggcaggaggcgggggtacgtggagaccctcttcggccgccgccgctacgtgccagacctattagcccgggtgaagagcgtgcgggaggcggccgagcgcatggccttcaacatgcccgtccagggcaccgccgccgacctcatgaagctggctatggtgaagctcttccccaggctggaggaaatgggggccaggatgctccttcaggtccacgacgagctggtcctcgaggccccaaaagagagggcggaggccgtggcccggctggccaaggaggtcatggagggggtgtatcccctggccgtgcccctggaggtggaggtggggataggggaggactggctctccgccaaggagtgataccaccccatgctggcccaagccagcatgggggccccggcaaaaggtttctggggaagttaccaggcatggtgggccgaaggaaacaggaaacaagggtatgagggttttttgccctaaagaaaggccagggggtcctcccgaaggaaggcttccagggggataccccctgggcccaggagtagcccctttcctccaaaggcctgggtgaaggcttttagccctttggtcctttgggaaggggcgcttttgacctccaaagccagaaggcgccttcccttcttcaagacgaagtcaacctcctggtccctttcccgccagtagtacacctcaaagcccccgtgggggccgtgggccagaaggtgggcgcccacggcggtttccacgagccgccccatgagggcggcgtccgcccacacctcctttggggaaagccccaagaccgccgtgatgagccccgtattaagggccaggagcttggggctcgaggcgcggcgccggaagggctcggcggcgtacttctgcag

SEQ ID NO: 3306 - DNA, 3026 bp, Artificial Sequence
  Description of Artificial Sequence: Synthetic DNA sequence of Thermus aquaticus DNA Polymerase E734K
atgagggggatgctgcccctctttgagcccaagggccgggtcctcctggtggacggccaccacctggcctaccgcaccttccacgccctgaagggcctcaccaccagccggggggagccggtgcaggcggtctacggcttcgccaagagcctcctcaaggccctcaaggaggacggggacgcggtgatcgtggtctttgacgccaaggccccctccttccgccacgaggcctacggggggtacaaggcgggccgggcccccacgccggaggactttccccggcaactcgccctcatcaaggagctggtggacctcctggggctggcgcgcctcgaggtcccgggctacgaggcggacgacgtcctggccagcctggccaagaaggcggaaaaggagggctacgaggtccgcatcctcaccgccgacaaagacctttaccagctcctttccgaccgcatccacgccctccaccccgaggggtacctcatcaccccggcctggctttgggaaaagtacggcctgaggcccgaccagtgggccgactaccgggccctgaccggggacgagtccgacaaccttcccggggtcaagggcatcggggagaagacggcgaggaagcttctggaggagtgggggagcctggaagccctcctcaagaacctggaccggctgaagcccgccatccgggagaagatcctggcccacatggacgatctgaagctctcctgggacctggccaaggtgcgcaccgacctgcccctggaggtggacttcgccaaaaggcgggagcccgaccgggagaggcttagggcctttctggagaggcttgagtttggcagcctcctccacgagttcggccttctggaaagccccaaggccctggaggaggccccctggcccccgccggaaggggccttcgtgggctttgtgctttcccgcaaggagcccatgtgggccgatcttctggccctggccgccgccagggggggccgggtccaccgggcccccgagccttataaagccctcagggacctgaaggaggcgcgggggcttctcgccaaagacctgagcgttctggccctgagggaaggccttggcctcccgcccggcgacgaccccatgctcctcgcctacctcctggacccttccaacaccacccccgagggggtggcccggcgctacggcggggagtggacggaggaggcgggggagcgggccgccctttccgagaggctcttcgccaacctgtgggggaggcttgagggggaggagaggctcctttggctttaccgggaggtggagaggcccctttccgctgtcctggcccacatggaggccacgggggtgcgcctggacgtggcctatctcagggccttgtccctggaggtggccgaggagatcgcccgcctcgaggccgaggtcttccgcctggccggccaccccttcaacctcaactcccgggaccagctggaaagggtcctctttgacgagctagggcttcccgccatcggcaagacggagaagaccggcaagcgctccaccagcgccgccgtcctggaggccctccgcgaggcccaccccatcgtggagaagatcctgcagtaccgggagctcaccaagctgaagagcacctacattgaccccttgccggacctcatccaccccaggacgggccgcctccacacccgcttcaaccagacggccacggccacgggcaggctaagtagctccgatcccaacctccagaacatccccgtccgcaccccgcttgggcagaggatccgccgggccttcatcgccgaggaggggtggctattggtggccctggactatagccagatagagctcagggtgctggcccacctctccggcgacgagaacctgatccgggtcttccaggaggggcgggacatccacacggagaccgccagctggatgttcggcgtcccccgggaggccgtggaccccctgatgcgccgggcggccaagaccatcaacttcggggtcctctacggcatgtcggcccaccgcctctcccaggagctagccatcccttacgaggaggcccaggccttcattgagcgctactttcagagcttccccaaggtgcgggcctggattgagaagaccctggaggagggcaggaggcgggggtacgtggagaccctcttcggccgccgccgctacgtgccagacctaaaagcccgggtgaagagcgtgcgggaggcggccgagcgcatggccttcaacatgcccgtccagggcaccgccgccgacctcatgaagctggctatggtgaagctcttccccaggctggaggaaatgggggccaggatgctccttcaggtccacgacgagctggtcctcgaggccccaaaagagagggcggaggccgtggcccggctggccaaggaggtcatggagggggtgtatcccctggccgtgcccctggaggtggaggtggggataggggaggactggctctccgccaaggagtgataccaccccatgctggcccaagccagcatgggggccccggcaaaaggtttctggggaagttaccaggcatggtgggccgaaggaaacaggaaacaagggtatgagggttttttgccctaaagaaaggccagggggtcctcccgaaggaaggcttccagggggataccccctgggcccaggagtagcccctttcctccaaaggcctgggtgaaggcttttagccctttggtcctttgggaaggggcgcttttgacctccaaagccagaaggcgccttcccttcttcaagacgaagtcaacctcctggtccctttcccgccagtagtacacctcaaagcccccgtgggggccgtgggccagaaggtgggcgcccacggcggtttccacgagccgccccatgagggcggcgtccgcccacacctcctttggggaaagccccaagaccgccgtgatgagccccgtattaagggccaggagcttggggctcgaggcgcggcgccggaagggctcggcggcgtacttctgcag

SEQ ID NO: 3307 - DNA, 3026 bp, Artificial Sequence
  Description of Artificial Sequence: Synthetic DNA sequence of Thermus aquaticus DNA Polymerase E734D
atgagggggatgctgcccctctttgagcccaagggccgggtcctcctggtggacggccaccacctggcctaccgcaccttccacgccctgaagggcctcaccaccagccggggggagccggtgcaggcggtctacggcttcgccaagagcctcctcaaggccctcaaggaggacggggacgcggtgatcgtggtctttgacgccaaggccccctccttccgccacgaggcctacggggggtacaaggcgggccgggcccccacgccggaggactttccccggcaactcgccctcatcaaggagctggtggacctcctggggctggcgcgcctcgaggtcccgggctacgaggcggacgacgtcctggccagcctggccaagaaggcggaaaaggagggctacgaggtccgcatcctcaccgccgacaaagacctttaccagctcctttccgaccgcatccacgccctccaccccgaggggtacctcatcaccccggcctggctttgggaaaagtacggcctgaggcccgaccagtgggccgactaccgggccctgaccggggacgagtccgacaaccttcccggggtcaagggcatcggggagaagacggcgaggaagcttctggaggagtgggggagcctggaagccctcctcaagaacctggaccggctgaagcccgccatccgggagaagatcctggcccacatggacgatctgaagctctcctgggacctggccaaggtgcgcaccgacctgcccctggaggtggacttcgccaaaaggcgggagcccgaccgggagaggcttagggcctttctggagaggcttgagtttggcagcctcctccacgagttcggccttctggaaagccccaaggccctggaggaggccccctggcccccgccggaaggggccttcgtgggctttgtgctttcccgcaaggagcccatgtgggccgatcttctggccctggccgccgccagggggggccgggtccaccgggcccccgagccttataaagccctcagggacctgaaggaggcgcgggggcttctcgccaaagacctgagcgttctggccctgagggaaggccttggcctcccgcccggcgacgaccccatgctcctcgcctacctcctggacccttccaacaccacccccgagggggtggcccggcgctacggcggggagtggacggaggaggcgggggagcgggccgccctttccgagaggctcttcgccaacctgtgggggaggcttgagggggaggagaggctcctttggctttaccgggaggtggagaggcccctttccgctgtcctggcccacatggaggccacgggggtgcgcctggacgtggcctatctcagggccttgtccctggaggtggccgaggagatcgcccgcctcgaggccgaggtcttccgcctggccggccaccccttcaacctcaactcccgggaccagctggaaagggtcctctttgacgagctagggcttcccgccatcggcaagacggagaagaccggcaagcgctccaccagcgccgccgtcctggaggccctccgcgaggcccaccccatcgtggagaagatcctgcagtaccgggagctcaccaagctgaagagcacctacattgaccccttgccggacctcatccaccccaggacgggccgcctccacacccgcttcaaccagacggccacggccacgggcaggctaagtagctccgatcccaacctccagaacatccccgtccgcaccccgcttgggcagaggatccgccgggccttcatcgccgaggaggggtggctattggtggccctggactatagccagatagagctcagggtgctggcccacctctccggcgacgagaacctgatccgggtcttccaggaggggcgggacatccacacggagaccgccagctggatgttcggcgtcccccgggaggccgtggaccccctgatgcgccgggcggccaagaccatcaacttcggggtcctctacggcatgtcggcccaccgcctctcccaggagctagccatcccttacgaggaggcccaggccttcattgagcgctactttcagagcttccccaaggtgcgggcctggattgagaagaccctggaggagggcaggaggcgggggtacgtggagaccctcttcggccgccgccgctacgtgccagacctagatgcccgggtgaagagcgtgcgggaggcggccgagcgcatggccttcaacatgcccgtccagggcaccgccgccgacctcatgaagctggctatggtgaagctcttccccaggctggaggaaatgggggccaggatgctccttcaggtccacgacgagctggtcctcgaggccccaaaagagagggcggaggccgtggcccggctggccaaggaggtcatggagggggtgtatcccctggccgtgcccctggaggtggaggtggggataggggaggactggctctccgccaaggagtgataccaccccatgctggcccaagccagcatgggggccccggcaaaaggtttctggggaagttaccaggcatggtgggccgaaggaaacaggaaacaagggtatgagggttttttgccctaaagaaaggccagggggtcctcccgaaggaaggcttccagggggataccccctgggcccaggagtagcccctttcctccaaaggcctgggtgaaggcttttagccctttggtcctttgggaaggggcgcttttgacctccaaagccagaaggcgccttcccttcttcaagacgaagtcaacctcctggtccctttcccgccagtagtacacctcaaagcccccgtgggggccgtgggccagaaggtgggcgcccacggcggtttccacgagccgccccatgagggcggcgtccgcccacacctcctttggggaaagccccaagaccgccgtgatgagccccgtattaagggccaggagcttggggctcgaggcgcggcgccggaagggctcggcggcgtacttctgcag

SEQ ID NO: 3308 - DNA, 3026 bp, Artificial Sequence
  Description of Artificial Sequence: Synthetic DNA sequence of Thermus aquaticus DNA Polymerase E734F
atgagggggatgctgcccctctttgagcccaagggccgggtcctcctggtggacggccaccacctggcctaccgcaccttccacgccctgaagggcctcaccaccagccggggggagccggtgcaggcggtctacggcttcgccaagagcctcctcaaggccctcaaggaggacggggacgcggtgatcgtggtctttgacgccaaggccccctccttccgccacgaggcctacggggggtacaaggcgggccgggcccccacgccggaggactttccccggcaactcgccctcatcaaggagctggtggacctcctggggctggcgcgcctcgaggtcccgggctacgaggcggacgacgtcctggccagcctggccaagaaggcggaaaaggagggctacgaggtccgcatcctcaccgccgacaaagacctttaccagctcctttccgaccgcatccacgccctccaccccgaggggtacctcatcaccccggcctggctttgggaaaagtacggcctgaggcccgaccagtgggccgactaccgggccctgaccggggacgagtccgacaaccttcccggggtcaagggcatcggggagaagacggcgaggaagcttctggaggagtgggggagcctggaagccctcctcaagaacctggaccggctgaagcccgccatccgggagaagatcctggcccacatggacgatctgaagctctcctgggacctggccaaggtgcgcaccgacctgcccctggaggtggacttcgccaaaaggcgggagcccgaccgggagaggcttagggcctttctggagaggcttgagtttggcagcctcctccacgagttcggccttctggaaagccccaaggccctggaggaggccccctggcccccgccggaaggggccttcgtgggctttgtgctttcccgcaaggagcccatgtgggccgatcttctggccctggccgccgccagggggggccgggtccaccgggcccccgagccttataaagccctcagggacctgaaggaggcgcgggggcttctcgccaaagacctgagcgttctggccctgagggaaggccttggcctcccgcccggcgacgaccccatgctcctcgcctacctcctggacccttccaacaccacccccgagggggtggcccggcgctacggcggggagtggacggaggaggcgggggagcgggccgccctttccgagaggctcttcgccaacctgtgggggaggcttgagggggaggagaggctcctttggctttaccgggaggtggagaggcccctttccgctgtcctggcccacatggaggccacgggggtgcgcctggacgtggcctatctcagggccttgtccctggaggtggccgaggagatcgcccgcctcgaggccgaggtcttccgcctggccggccaccccttcaacctcaactcccgggaccagctggaaagggtcctctttgacgagctagggcttcccgccatcggcaagacggagaagaccggcaagcgctccaccagcgccgccgtcctggaggccctccgcgaggcccaccccatcgtggagaagatcctgcagtaccgggagctcaccaagctgaagagcacctacattgaccccttgccggacctcatccaccccaggacgggccgcctccacacccgcttcaaccagacggccacggccacgggcaggctaagtagctccgatcccaacctccagaacatccccgtccgcaccccgcttgggcagaggatccgccgggccttcatcgccgaggaggggtggctattggtggccctggactatagccagatagagctcagggtgctggcccacctctccggcgacgagaacctgatccgggtcttccaggaggggcgggacatccacacggagaccgccagctggatgttcggcgtcccccgggaggccgtggaccccctgatgcgccgggcggccaagaccatcaacttcggggtcctctacggcatgtcggcccaccgcctctcccaggagctagccatcccttacgaggaggcccaggccttcattgagcgctactttcagagcttccccaaggtgcgggcctggattgagaagaccctggaggagggcaggaggcgggggtacgtggagaccctcttcggccgccgccgctacgtgccagacctatttgcccgggtgaagagcgtgcgggaggcggccgagcgcatggccttcaacatgcccgtccagggcaccgccgccgacctcatgaagctggctatggtgaagctcttccccaggctggaggaaatgggggccaggatgctccttcaggtccacgacgagctggtcctcgaggccccaaaagagagggcggaggccgtggcccggctggccaaggaggtcatggagggggtgtatcccctggccgtgcccctggaggtggaggtggggataggggaggactggctctccgccaaggagtgataccaccccatgctggcccaagccagcatgggggccccggcaaaaggtttctggggaagttaccaggcatggtgggccgaaggaaacaggaaacaagggtatgagggttttttgccctaaagaaaggccagggggtcctcccgaaggaaggcttccagggggataccccctgggcccaggagtagcccctttcctccaaaggcctgggtgaaggcttttagccctttggtcctttgggaaggggcgcttttgacctccaaagccagaaggcgccttcccttcttcaagacgaagtcaacctcctggtccctttcccgccagtagtacacctcaaagcccccgtgggggccgtgggccagaaggtgggcgcccacggcggtttccacgagccgccccatgagggcggcgtccgcccacacctcctttggggaaagccccaagaccgccgtgatgagccccgtattaagggccaggagcttggggctcgaggcgcggcgccggaagggctcggcggcgtacttctgcag

SEQ ID NO: 3309 - DNA, 3026 bp, Artificial Sequence
  Description of Artificial Sequence: Synthetic DNA sequence of Thermus aquaticus DNA Polymerase E734S
atgagggggatgctgcccctctttgagcccaagggccgggtcctcctggtggacggccaccacctggcctaccgcaccttccacgccctgaagggcctcaccaccagccggggggagccggtgcaggcggtctacggcttcgccaagagcctcctcaaggccctcaaggaggacggggacgcggtgatcgtggtctttgacgccaaggccccctccttccgccacgaggcctacggggggtacaaggcgggccgggcccccacgccggaggactttccccggcaactcgccctcatcaaggagctggtggacctcctggggctggcgcgcctcgaggtcccgggctacgaggcggacgacgtcctggccagcctggccaagaaggcggaaaaggagggctacgaggtccgcatcctcaccgccgacaaagacctttaccagctcctttccgaccgcatccacgccctccaccccgaggggtacctcatcaccccggcctggctttgggaaaagtacggcctgaggcccgaccagtgggccgactaccgggccctgaccggggacgagtccgacaaccttcccggggtcaagggcatcggggagaagacggcgaggaagcttctggaggagtgggggagcctggaagccctcctcaagaacctggaccggctgaagcccgccatccgggagaagatcctggcccacatggacgatctgaagctctcctgggacctggccaaggtgcgcaccgacctgcccctggaggtggacttcgccaaaaggcgggagcccgaccgggagaggcttagggcctttctggagaggcttgagtttggcagcctcctccacgagttcggccttctggaaagccccaaggccctggaggaggccccctggcccccgccggaaggggccttcgtgggctttgtgctttcccgcaaggagcccatgtgggccgatcttctggccctggccgccgccagggggggccgggtccaccgggcccccgagccttataaagccctcagggacctgaaggaggcgcgggggcttctcgccaaagacctgagcgttctggccctgagggaaggccttggcctcccgcccggcgacgaccccatgctcctcgcctacctcctggacccttccaacaccacccccgagggggtggcccggcgctacggcggggagtggacggaggaggcgggggagcgggccgccctttccgagaggctcttcgccaacctgtgggggaggcttgagggggaggagaggctcctttggctttaccgggaggtggagaggcccctttccgctgtcctggcccacatggaggccacgggggtgcgcctggacgtggcctatctcagggccttgtccctggaggtggccgaggagatcgcccgcctcgaggccgaggtcttccgcctggccggccaccccttcaacctcaactcccgggaccagctggaaagggtcctctttgacgagctagggcttcccgccatcggcaagacggagaagaccggcaagcgctccaccagcgccgccgtcctggaggccctccgcgaggcccaccccatcgtggagaagatcctgcagtaccgggagctcaccaagctgaagagcacctacattgaccccttgccggacctcatccaccccaggacgggccgcctccacacccgcttcaaccagacggccacggccacgggcaggctaagtagctccgatcccaacctccagaacatccccgtccgcaccccgcttgggcagaggatccgccgggccttcatcgccgaggaggggtggctattggtggccctggactatagccagatagagctcagggtgctggcccacctctccggcgacgagaacctgatccgggtcttccaggaggggcgggacatccacacggagaccgccagctggatgttcggcgtcccccgggaggccgtggaccccctgatgcgccgggcggccaagaccatcaacttcggggtcctctacggcatgtcggcccaccgcctctcccaggagctagccatcccttacgaggaggcccaggccttcattgagcgctactttcagagcttccccaaggtgcgggcctggattgagaagaccctggaggagggcaggaggcgggggtacgtggagaccctcttcggccgccgccgctacgtgccagacctatctgcccgggtgaagagcgtgcgggaggcggccgagcgcatggccttcaacatgcccgtccagggcaccgccgccgacctcatgaagctggctatggtgaagctcttccccaggctggaggaaatgggggccaggatgctccttcaggtccacgacgagctggtcctcgaggccccaaaagagagggcggaggccgtggcccggctggccaaggaggtcatggagggggtgtatcccctggccgtgcccctggaggtggaggtggggataggggaggactggctctccgccaaggagtgataccaccccatgctggcccaagccagcatgggggccccggcaaaaggtttctggggaagttaccaggcatggtgggccgaaggaaacaggaaacaagggtatgagggttttttgccctaaagaaaggccagggggtcctcccgaaggaaggcttccagggggataccccctgggcccaggagtagcccctttcctccaaaggcctgggtgaaggcttttagccctttggtcctttgggaaggggcgcttttgacctccaaagccagaaggcgccttcccttcttcaagacgaagtcaacctcctggtccctttcccgccagtagtacacctcaaagcccccgtgggggccgtgggccagaaggtgggcgcccacggcggtttccacgagccgccccatgagggcggcgtccgcccacacctcctttggggaaagccccaagaccgccgtgatgagccccgtattaagggccaggagcttggggctcgaggcgcggcgccggaagggctcggcggcgtacttctgcag

SEQ ID NO: 3310 - DNA, 3026 bp, Artificial Sequence
  Description of Artificial Sequence: Synthetic DNA sequence of Thermus aquaticus DNA Polymerase E734Y
atgagggggatgctgcccctctttgagcccaagggccgggtcctcctggtggacggccaccacctggcctaccgcaccttccacgccctgaagggcctcaccaccagccggggggagccggtgcaggcggtctacggcttcgccaagagcctcctcaaggccctcaaggaggacggggacgcggtgatcgtggtctttgacgccaaggccccctccttccgccacgaggcctacggggggtacaaggcgggccgggcccccacgccggaggactttccccggcaactcgccctcatcaaggagctggtggacctcctggggctggcgcgcctcgaggtcccgggctacgaggcggacgacgtcctggccagcctggccaagaaggcggaaaaggagggctacgaggtccgcatcctcaccgccgacaaagacctttaccagctcctttccgaccgcatccacgccctccaccccgaggggtacctcatcaccccggcctggctttgggaaaagtacggcctgaggcccgaccagtgggccgactaccgggccctgaccggggacgagtccgacaaccttcccggggtcaagggcatcggggagaagacggcgaggaagcttctggaggagtgggggagcctggaagccctcctcaagaacctggaccggctgaagcccgccatccgggagaagatcctggcccacatggacgatctgaagctctcctgggacctggccaaggtgcgcaccgacctgcccctggaggtggacttcgccaaaaggcgggagcccgaccgggagaggcttagggcctttctggagaggcttgagtttggcagcctcctccacgagttcggccttctggaaagccccaaggccctggaggaggccccctggcccccgccggaaggggccttcgtgggctttgtgctttcccgcaaggagcccatgtgggccgatcttctggccctggccgccgccagggggggccgggtccaccgggcccccgagccttataaagccctcagggacctgaaggaggcgcgggggcttctcgccaaagacctgagcgttctggccctgagggaaggccttggcctcccgcccggcgacgaccccatgctcctcgcctacctcctggacccttccaacaccacccccgagggggtggcccggcgctacggcggggagtggacggaggaggcgggggagcgggccgccctttccgagaggctcttcgccaacctgtgggggaggcttgagggggaggagaggctcctttggctttaccgggaggtggagaggcccctttccgctgtcctggcccacatggaggccacgggggtgcgcctggacgtggcctatctcagggccttgtccctggaggtggccgaggagatcgcccgcctcgaggccgaggtcttccgcctggccggccaccccttcaacctcaactcccgggaccagctggaaagggtcctctttgacgagctagggcttcccgccatcggcaagacggagaagaccggcaagcgctccaccagcgccgccgtcctggaggccctccgcgaggcccaccccatcgtggagaagatcctgcagtaccgggagctcaccaagctgaagagcacctacattgaccccttgccggacctcatccaccccaggacgggccgcctccacacccgcttcaaccagacggccacggccacgggcaggctaagtagctccgatcccaacctccagaacatccccgtccgcaccccgcttgggcagaggatccgccgggccttcatcgccgaggaggggtggctattggtggccctggactatagccagatagagctcagggtgctggcccacctctccggcgacgagaacctgatccgggtcttccaggaggggcgggacatccacacggagaccgccagctggatgttcggcgtcccccgggaggccgtggaccccctgatgcgccgggcggccaagaccatcaacttcggggtcctctacggcatgtcggcccaccgcctctcccaggagctagccatcccttacgaggaggcccaggccttcattgagcgctactttcagagcttccccaaggtgcgggcctggattgagaagaccctggaggagggcaggaggcgggggtacgtggagaccctcttcggccgccgccgctacgtgccagacctatatgcccgggtgaagagcgtgcgggaggcggccgagcgcatggccttcaacatgcccgtccagggcaccgccgccgacctcatgaagctggctatggtgaagctcttccccaggctggaggaaatgggggccaggatgctccttcaggtccacgacgagctggtcctcgaggccccaaaagagagggcggaggccgtggcccggctggccaaggaggtcatggagggggtgtatcccctggccgtgcccctggaggtggaggtggggataggggaggactggctctccgccaaggagtgataccaccccatgctggcccaagccagcatgggggccccggcaaaaggtttctggggaagttaccaggcatggtgggccgaaggaaacaggaaacaagggtatgagggttttttgccctaaagaaaggccagggggtcctcccgaaggaaggcttccagggggataccccctgggcccaggagtagcccctttcctccaaaggcctgggtgaaggcttttagccctttggtcctttgggaaggggcgcttttgacctccaaagccagaaggcgccttcccttcttcaagacgaagtcaacctcctggtccctttcccgccagtagtacacctcaaagcccccgtgggggccgtgggccagaaggtgggcgcccacggcggtttccacgagccgccccatgagggcggcgtccgcccacacctcctttggggaaagccccaagaccgccgtgatgagccccgtattaagggccaggagcttggggctcgaggcgcggcgccggaagggctcggcggcgtacttctgcag

SEQ ID NO: 3311 - DNA, 3026 bp, Artificial Sequence
  Description of Artificial Sequence: Synthetic DNA sequence of Thermus aquaticus DNA Polymerase E734W
atgagggggatgctgcccctctttgagcccaagggccgggtcctcctggtggacggccaccacctggcctaccgcaccttccacgccctgaagggcctcaccaccagccggggggagccggtgcaggcggtctacggcttcgccaagagcctcctcaaggccctcaaggaggacggggacgcggtgatcgtggtctttgacgccaaggccccctccttccgccacgaggcctacggggggtacaaggcgggccgggcccccacgccggaggactttccccggcaactcgccctcatcaaggagctggtggacctcctggggctggcgcgcctcgaggtcccgggctacgaggcggacgacgtcctggccagcctggccaagaaggcggaaaaggagggctacgaggtccgcatcctcaccgccgacaaagacctttaccagctcctttccgaccgcatccacgccctccaccccgaggggtacctcatcaccccggcctggctttgggaaaagtacggcctgaggcccgaccagtgggccgactaccgggccctgaccggggacgagtccgacaaccttcccggggtcaagggcatcggggagaagacggcgaggaagcttctggaggagtgggggagcctggaagccctcctcaagaacctggaccggctgaagcccgccatccgggagaagatcctggcccacatggacgatctgaagctctcctgggacctggccaaggtgcgcaccgacctgcccctggaggtggacttcgccaaaaggcgggagcccgaccgggagaggcttagggcctttctggagaggcttgagtttggcagcctcctccacgagttcggccttctggaaagccccaaggccctggaggaggccccctggcccccgccggaaggggccttcgtgggctttgtgctttcccgcaaggagcccatgtgggccgatcttctggccctggccgccgccagggggggccgggtccaccgggcccccgagccttataaagccctcagggacctgaaggaggcgcgggggcttctcgccaaagacctgagcgttctggccctgagggaaggccttggcctcccgcccggcgacgaccccatgctcctcgcctacctcctggacccttccaacaccacccccgagggggtggcccggcgctacggcggggagtggacggaggaggcgggggagcgggccgccctttccgagaggctcttcgccaacctgtgggggaggcttgagggggaggagaggctcctttggctttaccgggaggtggagaggcccctttccgctgtcctggcccacatggaggccacgggggtgcgcctggacgtggcctatctcagggccttgtccctggaggtggccgaggagatcgcccgcctcgaggccgaggtcttccgcctggccggccaccccttcaacctcaactcccgggaccagctggaaagggtcctctttgacgagctagggcttcccgccatcggcaagacggagaagaccggcaagcgctccaccagcgccgccgtcctggaggccctccgcgaggcccaccccatcgtggagaagatcctgcagtaccgggagctcaccaagctgaagagcacctacattgaccccttgccggacctcatccaccccaggacgggccgcctccacacccgcttcaaccagacggccacggccacgggcaggctaagtagctccgatcccaacctccagaacatccccgtccgcaccccgcttgggcagaggatccgccgggccttcatcgccgaggaggggtggctattggtggccctggactatagccagatagagctcagggtgctggcccacctctccggcgacgagaacctgatccgggtcttccaggaggggcgggacatccacacggagaccgccagctggatgttcggcgtcccccgggaggccgtggaccccctgatgcgccgggcggccaagaccatcaacttcggggtcctctacggcatgtcggcccaccgcctctcccaggagctagccatcccttacgaggaggcccaggccttcattgagcgctactttcagagcttccccaaggtgcgggcctggattgagaagaccctggaggagggcaggaggcgggggtacgtggagaccctcttcggccgccgccgctacgtgccagacctatgggcccgggtgaagagcgtgcgggaggcggccgagcgcatggccttcaacatgcccgtccagggcaccgccgccgacctcatgaagctggctatggtgaagctcttccccaggctggaggaaatgggggccaggatgctccttcaggtccacgacgagctggtcctcgaggccccaaaagagagggcggaggccgtggcccggctggccaaggaggtcatggagggggtgtatcccctggccgtgcccctggaggtggaggtggggataggggaggactggctctccgccaaggagtgataccaccccatgctggcccaagccagcatgggggccccggcaaaaggtttctggggaagttaccaggcatggtgggccgaaggaaacaggaaacaagggtatgagggttttttgccctaaagaaaggccagggggtcctcccgaaggaaggcttccagggggataccccctgggcccaggagtagcccctttcctccaaaggcctgggtgaaggcttttagccctttggtcctttgggaaggggcgcttttgacctccaaagccagaaggcgccttcccttcttcaagacgaagtcaacctcctggtccctttcccgccagtagtacacctcaaagcccccgtgggggccgtgggccagaaggtgggcgcccacggcggtttccacgagccgccccatgagggcggcgtccgcccacacctcctttggggaaagccccaagaccgccgtgatgagccccgtattaagggccaggagcttggggctcgaggcgcggcgccggaagggctcggcggcgtacttctgcag

SEQ ID NO: 3312 - DNA, 3026 bp, Artificial Sequence
  Description of Artificial Sequence: Synthetic DNA sequence of Thermus aquaticus DNA Polymerase E734P
atgagggggatgctgcccctctttgagcccaagggccgggtcctcctggtggacggccaccacctggcctaccgcaccttccacgccctgaagggcctcaccaccagccggggggagccggtgcaggcggtctacggcttcgccaagagcctcctcaaggccctcaaggaggacggggacgcggtgatcgtggtctttgacgccaaggccccctccttccgccacgaggcctacggggggtacaaggcgggccgggcccccacgccggaggactttccccggcaactcgccctcatcaaggagctggtggacctcctggggctggcgcgcctcgaggtcccgggctacgaggcggacgacgtcctggccagcctggccaagaaggcggaaaaggagggctacgaggtccgcatcctcaccgccgacaaagacctttaccagctcctttccgaccgcatccacgccctccaccccgaggggtacctcatcaccccggcctggctttgggaaaagtacggcctgaggcccgaccagtgggccgactaccgggccctgaccggggacgagtccgacaaccttcccggggtcaagggcatcggggagaagacggcgaggaagcttctggaggagtgggggagcctggaagccctcctcaagaacctggaccggctgaagcccgccatccgggagaagatcctggcccacatggacgatctgaagctctcctgggacctggccaaggtgcgcaccgacctgcccctggaggtggacttcgccaaaaggcgggagcccgaccgggagaggcttagggcctttctggagaggcttgagtttggcagcctcctccacgagttcggccttctggaaagccccaaggccctggaggaggccccctggcccccgccggaaggggccttcgtgggctttgtgctttcccgcaaggagcccatgtgggccgatcttctggccctggccgccgccagggggggccgggtccaccgggcccccgagccttataaagccctcagggacctgaaggaggcgcgggggcttctcgccaaagacctgagcgttctggccctgagggaaggccttggcctcccgcccggcgacgaccccatgctcctcgcctacctcctggacccttccaacaccacccccgagggggtggcccggcgctacggcggggagtggacggaggaggcgggggagcgggccgccctttccgagaggctcttcgccaacctgtgggggaggcttgagggggaggagaggctcctttggctttaccgggaggtggagaggcccctttccgctgtcctggcccacatggaggccacgggggtgcgcctggacgtggcctatctcagggccttgtccctggaggtggccgaggagatcgcccgcctcgaggccgaggtcttccgcctggccggccaccccttcaacctcaactcccgggaccagctggaaagggtcctctttgacgagctagggcttcccgccatcggcaagacggagaagaccggcaagcgctccaccagcgccgccgtcctggaggccctccgcgaggcccaccccatcgtggagaagatcctgcagtaccgggagctcaccaagctgaagagcacctacattgaccccttgccggacctcatccaccccaggacgggccgcctccacacccgcttcaaccagacggccacggccacgggcaggctaagtagctccgatcccaacctccagaacatccccgtccgcaccccgcttgggcagaggatccgccgggccttcatcgccgaggaggggtggctattggtggccctggactatagccagatagagctcagggtgctggcccacctctccggcgacgagaacctgatccgggtcttccaggaggggcgggacatccacacggagaccgccagctggatgttcggcgtcccccgggaggccgtggaccccctgatgcgccgggcggccaagaccatcaacttcggggtcctctacggcatgtcggcccaccgcctctcccaggagctagccatcccttacgaggaggcccaggccttcattgagcgctactttcagagcttccccaaggtgcgggcctggattgagaagaccctggaggagggcaggaggcgggggtacgtggagaccctcttcggccgccgccgctacgtgccagacctacctgcccgggtgaagagcgtgcgggaggcggccgagcgcatggccttcaacatgcccgtccagggcaccgccgccgacctcatgaagctggctatggtgaagctcttccccaggctggaggaaatgggggccaggatgctccttcaggtccacgacgagctggtcctcgaggccccaaaagagagggcggaggccgtggcccggctggccaaggaggtcatggagggggtgtatcccctggccgtgcccctggaggtggaggtggggataggggaggactggctctccgccaaggagtgataccaccccatgctggcccaagccagcatgggggccccggcaaaaggtttctggggaagttaccaggcatggtgggccgaaggaaacaggaaacaagggtatgagggttttttgccctaaagaaaggccagggggtcctcccgaaggaaggcttccagggggataccccctgggcccaggagtagcccctttcctccaaaggcctgggtgaaggcttttagccctttggtcctttgggaaggggcgcttttgacctccaaagccagaaggcgccttcccttcttcaagacgaagtcaacctcctggtccctttcccgccagtagtacacctcaaagcccccgtgggggccgtgggccagaaggtgggcgcccacggcggtttccacgagccgccccatgagggcggcgtccgcccacacctcctttggggaaagccccaagaccgccgtgatgagccccgtattaagggccaggagcttggggctcgaggcgcggcgccggaagggctcggcggcgtacttctgcag

SEQ ID NO: 3313 - DNA, 3026 bp, Artificial Sequence
  Description of Artificial Sequence: Synthetic DNA sequence of Thermus aquaticus DNA Polymerase E734M
atgagggggatgctgcccctctttgagcccaagggccgggtcctcctggtggacggccaccacctggcctaccgcaccttccacgccctgaagggcctcaccaccagccggggggagccggtgcaggcggtctacggcttcgccaagagcctcctcaaggccctcaaggaggacggggacgcggtgatcgtggtctttgacgccaaggccccctccttccgccacgaggcctacggggggtacaaggcgggccgggcccccacgccggaggactttccccggcaactcgccctcatcaaggagctggtggacctcctggggctggcgcgcctcgaggtcccgggctacgaggcggacgacgtcctggccagcctggccaagaaggcggaaaaggagggctacgaggtccgcatcctcaccgccgacaaagacctttaccagctcctttccgaccgcatccacgccctccaccccgaggggtacctcatcaccccggcctggctttgggaaaagtacggcctgaggcccgaccagtgggccgactaccgggccctgaccggggacgagtccgacaaccttcccggggtcaagggcatcggggagaagacggcgaggaagcttctggaggagtgggggagcctggaagccctcctcaagaacctggaccggctgaagcccgccatccgggagaagatcctggcccacatggacgatctgaagctctcctgggacctggccaaggtgcgcaccgacctgcccctggaggtggacttcgccaaaaggcgggagcccgaccgggagaggcttagggcctttctggagaggcttgagtttggcagcctcctccacgagttcggccttctggaaagccccaaggccctggaggaggccccctggcccccgccggaaggggccttcgtgggctttgtgctttcccgcaaggagcccatgtgggccgatcttctggccctggccgccgccagggggggccgggtccaccgggcccccgagccttataaagccctcagggacctgaaggaggcgcgggggcttctcgccaaagacctgagcgttctggccctgagggaaggccttggcctcccgcccggcgacgaccccatgctcctcgcctacctcctggacccttccaacaccacccccgagggggtggcccggcgctacggcggggagtggacggaggaggcgggggagcgggccgccctttccgagaggctcttcgccaacctgtgggggaggcttgagggggaggagaggctcctttggctttaccgggaggtggagaggcccctttccgctgtcctggcccacatggaggccacgggggtgcgcctggacgtggcctatctcagggccttgtccctggaggtggccgaggagatcgcccgcctcgaggccgaggtcttccgcctggccggccaccccttcaacctcaactcccgggaccagctggaaagggtcctctttgacgagctagggcttcccgccatcggcaagacggagaagaccggcaagcgctccaccagcgccgccgtcctggaggccctccgcgaggcccaccccatcgtggagaagatcctgcagtaccgggagctcaccaagctgaagagcacctacattgaccccttgccggacctcatccaccccaggacgggccgcctccacacccgcttcaaccagacggccacggccacgggcaggctaagtagctccgatcccaacctccagaacatccccgtccgcaccccgcttgggcagaggatccgccgggccttcatcgccgaggaggggtggctattggtggccctggactatagccagatagagctcagggtgctggcccacctctccggcgacgagaacctgatccgggtcttccaggaggggcgggacatccacacggagaccgccagctggatgttcggcgtcccccgggaggccgtggaccccctgatgcgccgggcggccaagaccatcaacttcggggtcctctacggcatgtcggcccaccgcctctcccaggagctagccatcccttacgaggaggcccaggccttcattgagcgctactttcagagcttccccaaggtgcgggcctggattgagaagaccctggaggagggcaggaggcgggggtacgtggagaccctcttcggccgccgccgctacgtgccagacctaatggcccgggtgaagagcgtgcgggaggcggccgagcgcatggccttcaacatgcccgtccagggcaccgccgccgacctcatgaagctggctatggtgaagctcttccccaggctggaggaaatgggggccaggatgctccttcaggtccacgacgagctggtcctcgaggccccaaaagagagggcggaggccgtggcccggctggccaaggaggtcatggagggggtgtatcccctggccgtgcccctggaggtggaggtggggataggggaggactggctctccgccaaggagtgataccaccccatgctggcccaagccagcatgggggccccggcaaaaggtttctggggaagttaccaggcatggtgggccgaaggaaacaggaaacaagggtatgagggttttttgccctaaagaaaggccagggggtcctcccgaaggaaggcttccagggggataccccctgggcccaggagtagcccctttcctccaaaggcctgggtgaaggcttttagccctttggtcctttgggaaggggcgcttttgacctccaaagccagaaggcgccttcccttcttcaagacgaagtcaacctcctggtccctttcccgccagtagtacacctcaaagcccccgtgggggccgtgggccagaaggtgggcgcccacggcggtttccacgagccgccccatgagggcggcgtccgcccacacctcctttggggaaagccccaagaccgccgtgatgagccccgtattaagggccaggagcttggggctcgaggcgcggcgccggaagggctcggcggcgtacttctgcag

SEQ ID NO: 3314 - DNA, 3026 bp, Artificial Sequence
  Description of Artificial Sequence: Synthetic DNA sequence of Thermus aquaticus DNA Polymerase E734T
atgagggggatgctgcccctctttgagcccaagggccgggtcctcctggtggacggccaccacctggcctaccgcaccttccacgccctgaagggcctcaccaccagccggggggagccggtgcaggcggtctacggcttcgccaagagcctcctcaaggccctcaaggaggacggggacgcggtgatcgtggtctttgacgccaaggccccctccttccgccacgaggcctacggggggtacaaggcgggccgggcccccacgccggaggactttccccggcaactcgccctcatcaaggagctggtggacctcctggggctggcgcgcctcgaggtcccgggctacgaggcggacgacgtcctggccagcctggccaagaaggcggaaaaggagggctacgaggtccgcatcctcaccgccgacaaagacctttaccagctcctttccgaccgcatccacgccctccaccccgaggggtacctcatcaccccggcctggctttgggaaaagtacggcctgaggcccgaccagtgggccgactaccgggccctgaccggggacgagtccgacaaccttcccggggtcaagggcatcggggagaagacggcgaggaagcttctggaggagtgggggagcctggaagccctcctcaagaacctggaccggctgaagcccgccatccgggagaagatcctggcccacatggacgatctgaagctctcctgggacctggccaaggtgcgcaccgacctgcccctggaggtggacttcgccaaaaggcgggagcccgaccgggagaggcttagggcctttctggagaggcttgagtttggcagcctcctccacgagttcggccttctggaaagccccaaggccctggaggaggccccctggcccccgccggaaggggccttcgtgggctttgtgctttcccgcaaggagcccatgtgggccgatcttctggccctggccgccgccagggggggccgggtccaccgggcccccgagccttataaagccctcagggacctgaaggaggcgcgggggcttctcgccaaagacctgagcgttctggccctgagggaaggccttggcctcccgcccggcgacgaccccatgctcctcgcctacctcctggacccttccaacaccacccccgagggggtggcccggcgctacggcggggagtggacggaggaggcgggggagcgggccgccctttccgagaggctcttcgccaacctgtgggggaggcttgagggggaggagaggctcctttggctttaccgggaggtggagaggcccctttccgctgtcctggcccacatggaggccacgggggtgcgcctggacgtggcctatctcagggccttgtccctggaggtggccgaggagatcgcccgcctcgaggccgaggtcttccgcctggccggccaccccttcaacctcaactcccgggaccagctggaaagggtcctctttgacgagctagggcttcccgccatcggcaagacggagaagaccggcaagcgctccaccagcgccgccgtcctggaggccctccgcgaggcccaccccatcgtggagaagatcctgcagtaccgggagctcaccaagctgaagagcacctacattgaccccttgccggacctcatccaccccaggacgggccgcctccacacccgcttcaaccagacggccacggccacgggcaggctaagtagctccgatcccaacctccagaacatccccgtccgcaccccgcttgggcagaggatccgccgggccttcatcgccgaggaggggtggctattggtggccctggactatagccagatagagctcagggtgctggcccacctctccggcgacgagaacctgatccgggtcttccaggaggggcgggacatccacacggagaccgccagctggatgttcggcgtcccccgggaggccgtggaccccctgatgcgccgggcggccaagaccatcaacttcggggtcctctacggcatgtcggcccaccgcctctcccaggagctagccatcccttacgaggaggcccaggccttcattgagcgctactttcagagcttccccaaggtgcgggcctggattgagaagaccctggaggagggcaggaggcgggggtacgtggagaccctcttcggccgccgccgctacgtgccagacctaactgcccgggtgaagagcgtgcgggaggcggccgagcgcatggccttcaacatgcccgtccagggcaccgccgccgacctcatgaagctggctatggtgaagctcttccccaggctggaggaaatgggggccaggatgctccttcaggtccacgacgagctggtcctcgaggccccaaaagagagggcggaggccgtggcccggctggccaaggaggtcatggagggggtgtatcccctggccgtgcccctggaggtggaggtggggataggggaggactggctctccgccaaggagtgataccaccccatgctggcccaagccagcatgggggccccggcaaaaggtttctggggaagttaccaggcatggtgggccgaaggaaacaggaaacaagggtatgagggttttttgccctaaagaaaggccagggggtcctcccgaaggaaggcttccagggggataccccctgggcccaggagtagcccctttcctccaaaggcctgggtgaaggcttttagccctttggtcctttgggaaggggcgcttttgacctccaaagccagaaggcgccttcccttcttcaagacgaagtcaacctcctggtccctttcccgccagtagtacacctcaaagcccccgtgggggccgtgggccagaaggtgggcgcccacggcggtttccacgagccgccccatgagggcggcgtccgcccacacctcctttggggaaagccccaagaccgccgtgatgagccccgtattaagggccaggagcttggggctcgaggcgcggcgccggaagggctcggcggcgtacttctgcag

SEQ ID NO: 3315 - DNA, 3026 bp, Artificial Sequence
  Description of Artificial Sequence: Synthetic DNA sequence of Thermus aquaticus DNA Polymerase E734N
atgagggggatgctgcccctctttgagcccaagggccgggtcctcctggtggacggccaccacctggcctaccgcaccttccacgccctgaagggcctcaccaccagccggggggagccggtgcaggcggtctacggcttcgccaagagcctcctcaaggccctcaaggaggacggggacgcggtgatcgtggtctttgacgccaaggccccctccttccgccacgaggcctacggggggtacaaggcgggccgggcccccacgccggaggactttccccggcaactcgccctcatcaaggagctggtggacctcctggggctggcgcgcctcgaggtcccgggctacgaggcggacgacgtcctggccagcctggccaagaaggcggaaaaggagggctacgaggtccgcatcctcaccgccgacaaagacctttaccagctcctttccgaccgcatccacgccctccaccccgaggggtacctcatcaccccggcctggctttgggaaaagtacggcctgaggcccgaccagtgggccgactaccgggccctgaccggggacgagtccgacaaccttcccggggtcaagggcatcggggagaagacggcgaggaagcttctggaggagtgggggagcctggaagccctcctcaagaacctggaccggctgaagcccgccatccgggagaagatcctggcccacatggacgatctgaagctctcctgggacctggccaaggtgcgcaccgacctgcccctggaggtggacttcgccaaaaggcgggagcccgaccgggagaggcttagggcctttctggagaggcttgagtttggcagcctcctccacgagttcggccttctggaaagccccaaggccctggaggaggccccctggcccccgccggaaggggccttcgtgggctttgtgctttcccgcaaggagcccatgtgggccgatcttctggccctggccgccgccagggggggccgggtccaccgggcccccgagccttataaagccctcagggacctgaaggaggcgcgggggcttctcgccaaagacctgagcgttctggccctgagggaaggccttggcctcccgcccggcgacgaccccatgctcctcgcctacctcctggacccttccaacaccacccccgagggggtggcccggcgctacggcggggagtggacggaggaggcgggggagcgggccgccctttccgagaggctcttcgccaacctgtgggggaggcttgagggggaggagaggctcctttggctttaccgggaggtggagaggcccctttccgctgtcctggcccacatggaggccacgggggtgcgcctggacgtggcctatctcagggccttgtccctggaggtggccgaggagatcgcccgcctcgaggccgaggtcttccgcctggccggccaccccttcaacctcaactcccgggaccagctggaaagggtcctctttgacgagctagggcttcccgccatcggcaagacggagaagaccggcaagcgctccaccagcgccgccgtcctggaggccctccgcgaggcccaccccatcgtggagaagatcctgcagtaccgggagctcaccaagctgaagagcacctacattgaccccttgccggacctcatccaccccaggacgggccgcctccacacccgcttcaaccagacggccacggccacgggcaggctaagtagctccgatcccaacctccagaacatccccgtccgcaccccgcttgggcagaggatccgccgggccttcatcgccgaggaggggtggctattggtggccctggactatagccagatagagctcagggtgctggcccacctctccggcgacgagaacctgatccgggtcttccaggaggggcgggacatccacacggagaccgccagctggatgttcggcgtcccccgggaggccgtggaccccctgatgcgccgggcggccaagaccatcaacttcggggtcctctacggcatgtcggcccaccgcctctcccaggagctagccatcccttacgaggaggcccaggccttcattgagcgctactttcagagcttccccaaggtgcgggcctggattgagaagaccctggaggagggcaggaggcgggggtacgtggagaccctcttcggccgccgccgctacgtgccagacctaaatgcccgggtgaagagcgtgcgggaggcggccgagcgcatggccttcaacatgcccgtccagggcaccgccgccgacctcatgaagctggctatggtgaagctcttccccaggctggaggaaatgggggccaggatgctccttcaggtccacgacgagctggtcctcgaggccccaaaagagagggcggaggccgtggcccggctggccaaggaggtcatggagggggtgtatcccctggccgtgcccctggaggtggaggtggggataggggaggactggctctccgccaaggagtgataccaccccatgctggcccaagccagcatgggggccccggcaaaaggtttctggggaagttaccaggcatggtgggccgaaggaaacaggaaacaagggtatgagggttttttgccctaaagaaaggccagggggtcctcccgaaggaaggcttccagggggataccccctgggcccaggagtagcccctttcctccaaaggcctgggtgaaggcttttagccctttggtcctttgggaaggggcgcttttgacctccaaagccagaaggcgccttcccttcttcaagacgaagtcaacctcctggtccctttcccgccagtagtacacctcaaagcccccgtgggggccgtgggccagaaggtgggcgcccacggcggtttccacgagccgccccatgagggcggcgtccgcccacacctcctttggggaaagccccaagaccgccgtgatgagccccgtattaagggccaggagcttggggctcgaggcgcggcgccggaagggctcggcggcgtacttctgcag

SEQ ID NO: 3316 - DNA, 3026 bp, Artificial Sequence
  Description of Artificial Sequence: Synthetic DNA sequence of Thermus aquaticus DNA Polymerase E734V
atgagggggatgctgcccctctttgagcccaagggccgggtcctcctggtggacggccaccacctggcctaccgcaccttccacgccctgaagggcctcaccaccagccggggggagccggtgcaggcggtctacggcttcgccaagagcctcctcaaggccctcaaggaggacggggacgcggtgatcgtggtctttgacgccaaggccccctccttccgccacgaggcctacggggggtacaaggcgggccgggcccccacgccggaggactttccccggcaactcgccctcatcaaggagctggtggacctcctggggctggcgcgcctcgaggtcccgggctacgaggcggacgacgtcctggccagcctggccaagaaggcggaaaaggagggctacgaggtccgcatcctcaccgccgacaaagacctttaccagctcctttccgaccgcatccacgccctccaccccgaggggtacctcatcaccccggcctggctttgggaaaagtacggcctgaggcccgaccagtgggccgactaccgggccctgaccggggacgagtccgacaaccttcccggggtcaagggcatcggggagaagacggcgaggaagcttctggaggagtgggggagcctggaagccctcctcaagaacctggaccggctgaagcccgccatccgggagaagatcctggcccacatggacgatctgaagctctcctgggacctggccaaggtgcgcaccgacctgcccctggaggtggacttcgccaaaaggcgggagcccgaccgggagaggcttagggcctttctggagaggcttgagtttggcagcctcctccacgagttcggccttctggaaagccccaaggccctggaggaggccccctggcccccgccggaaggggccttcgtgggctttgtgctttcccgcaaggagcccatgtgggccgatcttctggccctggccgccgccagggggggccgggtccaccgggcccccgagccttataaagccctcagggacctgaaggaggcgcgggggcttctcgccaaagacctgagcgttctggccctgagggaaggccttggcctcccgcccggcgacgaccccatgctcctcgcctacctcctggacccttccaacaccacccccgagggggtggcccggcgctacggcggggagtggacggaggaggcgggggagcgggccgccctttccgagaggctcttcgccaacctgtgggggaggcttgagggggaggagaggctcctttggctttaccgggaggtggagaggcccctttccgctgtcctggcccacatggaggccacgggggtgcgcctggacgtggcctatctcagggccttgtccctggaggtggccgaggagatcgcccgcctcgaggccgaggtcttccgcctggccggccaccccttcaacctcaactcccgggaccagctggaaagggtcctctttgacgagctagggcttcccgccatcggcaagacggagaagaccggcaagcgctccaccagcgccgccgtcctggaggccctccgcgaggcccaccccatcgtggagaagatcctgcagtaccgggagctcaccaagctgaagagcacctacattgaccccttgccggacctcatccaccccaggacgggccgcctccacacccgcttcaaccagacggccacggccacgggcaggctaagtagctccgatcccaacctccagaacatccccgtccgcaccccgcttgggcagaggatccgccgggccttcatcgccgaggaggggtggctattggtggccctggactatagccagatagagctcagggtgctggcccacctctccggcgacgagaacctgatccgggtcttccaggaggggcgggacatccacacggagaccgccagctggatgttcggcgtcccccgggaggccgtggaccccctgatgcgccgggcggccaagaccatcaacttcggggtcctctacggcatgtcggcccaccgcctctcccaggagctagccatcccttacgaggaggcccaggccttcattgagcgctactttcagagcttccccaaggtgcgggcctggattgagaagaccctggaggagggcaggaggcgggggtacgtggagaccctcttcggccgccgccgctacgtgccagacctagtcgcccgggtgaagagcgtgcgggaggcggccgagcgcatggccttcaacatgcccgtccagggcaccgccgccgacctcatgaagctggctatggtgaagctcttccccaggctggaggaaatgggggccaggatgctccttcaggtccacgacgagctggtcctcgaggccccaaaagagagggcggaggccgtggcccggctggccaaggaggtcatggagggggtgtatcccctggccgtgcccctggaggtggaggtggggataggggaggactggctctccgccaaggagtgataccaccccatgctggcccaagccagcatgggggccccggcaaaaggtttctggggaagttaccaggcatggtgggccgaaggaaacaggaaacaagggtatgagggttttttgccctaaagaaaggccagggggtcctcccgaaggaaggcttccagggggataccccctgggcccaggagtagcccctttcctccaaaggcctgggtgaaggcttttagccctttggtcctttgggaaggggcgcttttgacctccaaagccagaaggcgccttcccttcttcaagacgaagtcaacctcctggtccctttcccgccagtagtacacctcaaagcccccgtgggggccgtgggccagaaggtgggcgcccacggcggtttccacgagccgccccatgagggcggcgtccgcccacacctcctttggggaaagccccaagaccgccgtgatgagccccgtattaagggccaggagcttggggctcgaggcgcggcgccggaagggctcggcggcgtacttctgcag

SEQ ID NO: 3317 - DNA, 3026 bp, Artificial Sequence
  Description of Artificial Sequence: Synthetic DNA sequence of Thermus aquaticus DNA Polymerase A735R
atgagggggatgctgcccctctttgagcccaagggccgggtcctcctggtggacggccaccacctggcctaccgcaccttccacgccctgaagggcctcaccaccagccggggggagccggtgcaggcggtctacggcttcgccaagagcctcctcaaggccctcaaggaggacggggacgcggtgatcgtggtctttgacgccaaggccccctccttccgccacgaggcctacggggggtacaaggcgggccgggcccccacgccggaggactttccccggcaactcgccctcatcaaggagctggtggacctcctggggctggcgcgcctcgaggtcccgggctacgaggcggacgacgtcctggccagcctggccaagaaggcggaaaaggagggctacgaggtccgcatcctcaccgccgacaaagacctttaccagctcctttccgaccgcatccacgccctccaccccgaggggtacctcatcaccccggcctggctttgggaaaagtacggcctgaggcccgaccagtgggccgactaccgggccctgaccggggacgagtccgacaaccttcccggggtcaagggcatcggggagaagacggcgaggaagcttctggaggagtgggggagcctggaagccctcctcaagaacctggaccggctgaagcccgccatccgggagaagatcctggcccacatggacgatctgaagctctcctgggacctggccaaggtgcgcaccgacctgcccctggaggtggacttcgccaaaaggcgggagcccgaccgggagaggcttagggcctttctggagaggcttgagtttggcagcctcctccacgagttcggccttctggaaagccccaaggccctggaggaggccccctggcccccgccggaaggggccttcgtgggctttgtgctttcccgcaaggagcccatgtgggccgatcttctggccctggccgccgccagggggggccgggtccaccgggcccccgagccttataaagccctcagggacctgaaggaggcgcgggggcttctcgccaaagacctgagcgttctggccctgagggaaggccttggcctcccgcccggcgacgaccccatgctcctcgcctacctcctggacccttccaacaccacccccgagggggtggcccggcgctacggcggggagtggacggaggaggcgggggagcgggccgccctttccgagaggctcttcgccaacctgtgggggaggcttgagggggaggagaggctcctttggctttaccgggaggtggagaggcccctttccgctgtcctggcccacatggaggccacgggggtgcgcctggacgtggcctatctcagggccttgtccctggaggtggccgaggagatcgcccgcctcgaggccgaggtcttccgcctggccggccaccccttcaacctcaactcccgggaccagctggaaagggtcctctttgacgagctagggcttcccgccatcggcaagacggagaagaccggcaagcgctccaccagcgccgccgtcctggaggccctccgcgaggcccaccccatcgtggagaagatcctgcagtaccgggagctcaccaagctgaagagcacctacattgaccccttgccggacctcatccaccccaggacgggccgcctccacacccgcttcaaccagacggccacggccacgggcaggctaagtagctccgatcccaacctccagaacatccccgtccgcaccccgcttgggcagaggatccgccgggccttcatcgccgaggaggggtggctattggtggccctggactatagccagatagagctcagggtgctggcccacctctccggcgacgagaacctgatccgggtcttccaggaggggcgggacatccacacggagaccgccagctggatgttcggcgtcccccgggaggccgtggaccccctgatgcgccgggcggccaagaccatcaacttcggggtcctctacggcatgtcggcccaccgcctctcccaggagctagccatcccttacgaggaggcccaggccttcattgagcgctactttcagagcttccccaaggtgcgggcctggattgagaagaccctggaggagggcaggaggcgggggtacgtggagaccctcttcggccgccgccgctacgtgccagacctagagcgacgggtgaagagcgtgcgggaggcggccgagcgcatggccttcaacatgcccgtccagggcaccgccgccgacctcatgaagctggctatggtgaagctcttccccaggctggaggaaatgggggccaggatgctccttcaggtccacgacgagctggtcctcgaggccccaaaagagagggcggaggccgtggcccggctggccaaggaggtcatggagggggtgtatcccctggccgtgcccctggaggtggaggtggggataggggaggactggctctccgccaaggagtgataccaccccatgctggcccaagccagcatgggggccccggcaaaaggtttctggggaagttaccaggcatggtgggccgaaggaaacaggaaacaagggtatgagggttttttgccctaaagaaaggccagggggtcctcccgaaggaaggcttccagggggataccccctgggcccaggagtagcccctttcctccaaaggcctgggtgaaggcttttagccctttggtcctttgggaaggggcgcttttgacctccaaagccagaaggcgccttcccttcttcaagacgaagtcaacctcctggtccctttcccgccagtagtacacctcaaagcccccgtgggggccgtgggccagaaggtgggcgcccacggcggtttccacgagccgccccatgagggcggcgtccgcccacacctcctttggggaaagccccaagaccgccgtgatgagccccgtattaagggccaggagcttggggctcgaggcgcggcgccggaagggctcggcggcgtacttctgcag

SEQ ID NO: 3318 - DNA, 3026 bp, Artificial Sequence
  Description of Artificial Sequence: Synthetic DNA sequence of Thermus aquaticus DNA Polymerase A735C
atgagggggatgctgcccctctttgagcccaagggccgggtcctcctggtggacggccaccacctggcctaccgcaccttccacgccctgaagggcctcaccaccagccggggggagccggtgcaggcggtctacggcttcgccaagagcctcctcaaggccctcaaggaggacggggacgcggtgatcgtggtctttgacgccaaggccccctccttccgccacgaggcctacggggggtacaaggcgggccgggcccccacgccggaggactttccccggcaactcgccctcatcaaggagctggtggacctcctggggctggcgcgcctcgaggtcccgggctacgaggcggacgacgtcctggccagcctggccaagaaggcggaaaaggagggctacgaggtccgcatcctcaccgccgacaaagacctttaccagctcctttccgaccgcatccacgccctccaccccgaggggtacctcatcaccccggcctggctttgggaaaagtacggcctgaggcccgaccagtgggccgactaccgggccctgaccggggacgagtccgacaaccttcccggggtcaagggcatcggggagaagacggcgaggaagcttctggaggagtgggggagcctggaagccctcctcaagaacctggaccggctgaagcccgccatccgggagaagatcctggcccacatggacgatctgaagctctcctgggacctggccaaggtgcgcaccgacctgcccctggaggtggacttcgccaaaaggcgggagcccgaccgggagaggcttagggcctttctggagaggcttgagtttggcagcctcctccacgagttcggccttctggaaagccccaaggccctggaggaggccccctggcccccgccggaaggggccttcgtgggctttgtgctttcccgcaaggagcccatgtgggccgatcttctggccctggccgccgccagggggggccgggtccaccgggcccccgagccttataaagccctcagggacctgaaggaggcgcgggggcttctcgccaaagacctgagcgttctggccctgagggaaggccttggcctcccgcccggcgacgaccccatgctcctcgcctacctcctggacccttccaacaccacccccgagggggtggcccggcgctacggcggggagtggacggaggaggcgggggagcgggccgccctttccgagaggctcttcgccaacctgtgggggaggcttgagggggaggagaggctcctttggctttaccgggaggtggagaggcccctttccgctgtcctggcccacatggaggccacgggggtgcgcctggacgtggcctatctcagggccttgtccctggaggtggccgaggagatcgcccgcctcgaggccgaggtcttccgcctggccggccaccccttcaacctcaactcccgggaccagctggaaagggtcctctttgacgagctagggcttcccgccatcggcaagacggagaagaccggcaagcgctccaccagcgccgccgtcctggaggccctccgcgaggcccaccccatcgtggagaagatcctgcagtaccgggagctcaccaagctgaagagcacctacattgaccccttgccggacctcatccaccccaggacgggccgcctccacacccgcttcaaccagacggccacggccacgggcaggctaagtagctccgatcccaacctccagaacatccccgtccgcaccccgcttgggcagaggatccgccgggccttcatcgccgaggaggggtggctattggtggccctggactatagccagatagagctcagggtgctggcccacctctccggcgacgagaacctgatccgggtcttccaggaggggcgggacatccacacggagaccgccagctggatgttcggcgtcccccgggaggccgtggaccccctgatgcgccgggcggccaagaccatcaacttcggggtcctctacggcatgtcggcccaccgcctctcccaggagctagccatcccttacgaggaggcccaggccttcattgagcgctactttcagagcttccccaaggtgcgggcctggattgagaagaccctggaggagggcaggaggcgggggtacgtggagaccctcttcggccgccgccgctacgtgccagacctagagtgtcgggtgaagagcgtgcgggaggcggccgagcgcatggccttcaacatgcccgtccagggcaccgccgccgacctcatgaagctggctatggtgaagctcttccccaggctggaggaaatgggggccaggatgctccttcaggtccacgacgagctggtcctcgaggccccaaaagagagggcggaggccgtggcccggctggccaaggaggtcatggagggggtgtatcccctggccgtgcccctggaggtggaggtggggataggggaggactggctctccgccaaggagtgataccaccccatgctggcccaagccagcatgggggccccggcaaaaggtttctggggaagttaccaggcatggtgggccgaaggaaacaggaaacaagggtatgagggttttttgccctaaagaaaggccagggggtcctcccgaaggaaggcttccagggggataccccctgggcccaggagtagcccctttcctccaaaggcctgggtgaaggcttttagccctttggtcctttgggaaggggcgcttttgacctccaaagccagaaggcgccttcccttcttcaagacgaagtcaacctcctggtccctttcccgccagtagtacacctcaaagcccccgtgggggccgtgggccagaaggtgggcgcccacggcggtttccacgagccgccccatgagggcggcgtccgcccacacctcctttggggaaagccccaagaccgccgtgatgagccccgtattaagggccaggagcttggggctcgaggcgcggcgccggaagggctcggcggcgtacttctgcag

SEQ ID NO: 3319 - DNA, 3026 bp, Artificial Sequence
  Description of Artificial Sequence: Synthetic DNA sequence of Thermus aquaticus DNA Polymerase A735G
atgagggggatgctgcccctctttgagcccaagggccgggtcctcctggtggacggccaccacctggcctaccgcaccttccacgccctgaagggcctcaccaccagccggggggagccggtgcaggcggtctacggcttcgccaagagcctcctcaaggccctcaaggaggacggggacgcggtgatcgtggtctttgacgccaaggccccctccttccgccacgaggcctacggggggtacaaggcgggccgggcccccacgccggaggactttccccggcaactcgccctcatcaaggagctggtggacctcctggggctggcgcgcctcgaggtcccgggctacgaggcggacgacgtcctggccagcctggccaagaaggcggaaaaggagggctacgaggtccgcatcctcaccgccgacaaagacctttaccagctcctttccgaccgcatccacgccctccaccccgaggggtacctcatcaccccggcctggctttgggaaaagtacggcctgaggcccgaccagtgggccgactaccgggccctgaccggggacgagtccgacaaccttcccggggtcaagggcatcggggagaagacggcgaggaagcttctggaggagtgggggagcctggaagccctcctcaagaacctggaccggctgaagcccgccatccgggagaagatcctggcccacatggacgatctgaagctctcctgggacctggccaaggtgcgcaccgacctgcccctggaggtggacttcgccaaaaggcgggagcccgaccgggagaggcttagggcctttctggagaggcttgagtttggcagcctcctccacgagttcggccttctggaaagccccaaggccctggaggaggccccctggcccccgccggaaggggccttcgtgggctttgtgctttcccgcaaggagcccatgtgggccgatcttctggccctggccgccgccagggggggccgggtccaccgggcccccgagccttataaagccctcagggacctgaaggaggcgcgggggcttctcgccaaagacctgagcgttctggccctgagggaaggccttggcctcccgcccggcgacgaccccatgctcctcgcctacctcctggacccttccaacaccacccccgagggggtggcccggcgctacggcggggagtggacggaggaggcgggggagcgggccgccctttccgagaggctcttcgccaacctgtgggggaggcttgagggggaggagaggctcctttggctttaccgggaggtggagaggcccctttccgctgtcctggcccacatggaggccacgggggtgcgcctggacgtggcctatctcagggccttgtccctggaggtggccgaggagatcgcccgcctcgaggccgaggtcttccgcctggccggccaccccttcaacctcaactcccgggaccagctggaaagggtcctctttgacgagctagggcttcccgccatcggcaagacggagaagaccggcaagcgctccaccagcgccgccgtcctggaggccctccgcgaggcccaccccatcgtggagaagatcctgcagtaccgggagctcaccaagctgaagagcacctacattgaccccttgccggacctcatccaccccaggacgggccgcctccacacccgcttcaaccagacggccacggccacgggcaggctaagtagctccgatcccaacctccagaacatccccgtccgcaccccgcttgggcagaggatccgccgggccttcatcgccgaggaggggtggctattggtggccctggactatagccagatagagctcagggtgctggcccacctctccggcgacgagaacctgatccgggtcttccaggaggggcgggacatccacacggagaccgccagctggatgttcggcgtcccccgggaggccgtggaccccctgatgcgccgggcggccaagaccatcaacttcggggtcctctacggcatgtcggcccaccgcctctcccaggagctagccatcccttacgaggaggcccaggccttcattgagcgctactttcagagcttccccaaggtgcgggcctggattgagaagaccctggaggagggcaggaggcgggggtacgtggagaccctcttcggccgccgccgctacgtgccagacctagagggtcgggtgaagagcgtgcgggaggcggccgagcgcatggccttcaacatgcccgtccagggcaccgccgccgacctcatgaagctggctatggtgaagctcttccccaggctggaggaaatgggggccaggatgctccttcaggtccacgacgagctggtcctcgaggccccaaaagagagggcggaggccgtggcccggctggccaaggaggtcatggagggggtgtatcccctggccgtgcccctggaggtggaggtggggataggggaggactggctctccgccaaggagtgataccaccccatgctggcccaagccagcatgggggccccggcaaaaggtttctggggaagttaccaggcatggtgggccgaaggaaacaggaaacaagggtatgagggttttttgccctaaagaaaggccagggggtcctcccgaaggaaggcttccagggggataccccctgggcccaggagtagcccctttcctccaaaggcctgggtgaaggcttttagccctttggtcctttgggaaggggcgcttttgacctccaaagccagaaggcgccttcccttcttcaagacgaagtcaacctcctggtccctttcccgccagtagtacacctcaaagcccccgtgggggccgtgggccagaaggtgggcgcccacggcggtttccacgagccgccccatgagggcggcgtccgcccacacctcctttggggaaagccccaagaccgccgtgatgagccccgtattaagggccaggagcttggggctcgaggcgcggcgccggaagggctcggcggcgtacttctgcag

SEQ ID NO: 3320 - DNA, 3026 bp, Artificial Sequence
  Description of Artificial Sequence: Synthetic DNA sequence of Thermus aquaticus DNA Polymerase A735Q
atgagggggatgctgcccctctttgagcccaagggccgggtcctcctggtggacggccaccacctggcctaccgcaccttccacgccctgaagggcctcaccaccagccggggggagccggtgcaggcggtctacggcttcgccaagagcctcctcaaggccctcaaggaggacggggacgcggtgatcgtggtctttgacgccaaggccccctccttccgccacgaggcctacggggggtacaaggcgggccgggcccccacgccggaggactttccccggcaactcgccctcatcaaggagctggtggacctcctggggctggcgcgcctcgaggtcccgggctacgaggcggacgacgtcctggccagcctggccaagaaggcggaaaaggagggctacgaggtccgcatcctcaccgccgacaaagacctttaccagctcctttccgaccgcatccacgccctccaccccgaggggtacctcatcaccccggcctggctttgggaaaagtacggcctgaggcccgaccagtgggccgactaccgggccctgaccggggacgagtccgacaaccttcccggggtcaagggcatcggggagaagacggcgaggaagcttctggaggagtgggggagcctggaagccctcctcaagaacctggaccggctgaagcccgccatccgggagaagatcctggcccacatggacgatctgaagctctcctgggacctggccaaggtgcgcaccgacctgcccctggaggtggacttcgccaaaaggcgggagcccgaccgggagaggcttagggcctttctggagaggcttgagtttggcagcctcctccacgagttcggccttctggaaagccccaaggccctggaggaggccccctggcccccgccggaaggggccttcgtgggctttgtgctttcccgcaaggagcccatgtgggccgatcttctggccctggccgccgccagggggggccgggtccaccgggcccccgagccttataaagccctcagggacctgaaggaggcgcgggggcttctcgccaaagacctgagcgttctggccctgagggaaggccttggcctcccgcccggcgacgaccccatgctcctcgcctacctcctggacccttccaacaccacccccgagggggtggcccggcgctacggcggggagtggacggaggaggcgggggagcgggccgccctttccgagaggctcttcgccaacctgtgggggaggcttgagggggaggagaggctcctttggctttaccgggaggtggagaggcccctttccgctgtcctggcccacatggaggccacgggggtgcgcctggacgtggcctatctcagggccttgtccctggaggtggccgaggagatcgcccgcctcgaggccgaggtcttccgcctggccggccaccccttcaacctcaactcccgggaccagctggaaagggtcctctttgacgagctagggcttcccgccatcggcaagacggagaagaccggcaagcgctccaccagcgccgccgtcctggaggccctccgcgaggcccaccccatcgtggagaagatcctgcagtaccgggagctcaccaagctgaagagcacctacattgaccccttgccggacctcatccaccccaggacgggccgcctccacacccgcttcaaccagacggccacggccacgggcaggctaagtagctccgatcccaacctccagaacatccccgtccgcaccccgcttgggcagaggatccgccgggccttcatcgccgaggaggggtggctattggtggccctggactatagccagatagagctcagggtgctggcccacctctccggcgacgagaacctgatccgggtcttccaggaggggcgggacatccacacggagaccgccagctggatgttcggcgtcccccgggaggccgtggaccccctgatgcgccgggcggccaagaccatcaacttcggggtcctctacggcatgtcggcccaccgcctctcccaggagctagccatcccttacgaggaggcccaggccttcattgagcgctactttcagagcttccccaaggtgcgggcctggattgagaagaccctggaggagggcaggaggcgggggtacgtggagaccctcttcggccgccgccgctacgtgccagacctagagcaacgggtgaagagcgtgcgggaggcggccgagcgcatggccttcaacatgcccgtccagggcaccgccgccgacctcatgaagctggctatggtgaagctcttccccaggctggaggaaatgggggccaggatgctccttcaggtccacgacgagctggtcctcgaggccccaaaagagagggcggaggccgtggcccggctggccaaggaggtcatggagggggtgtatcccctggccgtgcccctggaggtggaggtggggataggggaggactggctctccgccaaggagtgataccaccccatgctggcccaagccagcatgggggccccggcaaaaggtttctggggaagttaccaggcatggtgggccgaaggaaacaggaaacaagggtatgagggttttttgccctaaagaaaggccagggggtcctcccgaaggaaggcttccagggggataccccctgggcccaggagtagcccctttcctccaaaggcctgggtgaaggcttttagccctttggtcctttgggaaggggcgcttttgacctccaaagccagaaggcgccttcccttcttcaagacgaagtcaacctcctggtccctttcccgccagtagtacacctcaaagcccccgtgggggccgtgggccagaaggtgggcgcccacggcggtttccacgagccgccccatgagggcggcgtccgcccacacctcctttggggaaagccccaagaccgccgtgatgagccccgtattaagggccaggagcttggggctcgaggcgcggcgccggaagggctcggcggcgtacttctgcag

SEQ ID NO: 3321 - DNA, 3026 bp, Artificial Sequence
  Description of Artificial Sequence: Synthetic DNA sequence of Thermus aquaticus DNA Polymerase A735H
atgagggggatgctgcccctctttgagcccaagggccgggtcctcctggtggacggccaccacctggcctaccgcaccttccacgccctgaagggcctcaccaccagccggggggagccggtgcaggcggtctacggcttcgccaagagcctcctcaaggccctcaaggaggacggggacgcggtgatcgtggtctttgacgccaaggccccctccttccgccacgaggcctacggggggtacaaggcgggccgggcccccacgccggaggactttccccggcaactcgccctcatcaaggagctggtggacctcctggggctggcgcgcctcgaggtcccgggctacgaggcggacgacgtcctggccagcctggccaagaaggcggaaaaggagggctacgaggtccgcatcctcaccgccgacaaagacctttaccagctcctttccgaccgcatccacgccctccaccccgaggggtacctcatcaccccggcctggctttgggaaaagtacggcctgaggcccgaccagtgggccgactaccgggccctgaccggggacgagtccgacaaccttcccggggtcaagggcatcggggagaagacggcgaggaagcttctggaggagtgggggagcctggaagccctcctcaagaacctggaccggctgaagcccgccatccgggagaagatcctggcccacatggacgatctgaagctctcctgggacctggccaaggtgcgcaccgacctgcccctggaggtggacttcgccaaaaggcgggagcccgaccgggagaggcttagggcctttctggagaggcttgagtttggcagcctcctccacgagttcggccttctggaaagccccaaggccctggaggaggccccctggcccccgccggaaggggccttcgtgggctttgtgctttcccgcaaggagcccatgtgggccgatcttctggccctggccgccgccagggggggccgggtccaccgggcccccgagccttataaagccctcagggacctgaaggaggcgcgggggcttctcgccaaagacctgagcgttctggccctgagggaaggccttggcctcccgcccggcgacgaccccatgctcctcgcctacctcctggacccttccaacaccacccccgagggggtggcccggcgctacggcggggagtggacggaggaggcgggggagcgggccgccctttccgagaggctcttcgccaacctgtgggggaggcttgagggggaggagaggctcctttggctttaccgggaggtggagaggcccctttccgctgtcctggcccacatggaggccacgggggtgcgcctggacgtggcctatctcagggccttgtccctggaggtggccgaggagatcgcccgcctcgaggccgaggtcttccgcctggccggccaccccttcaacctcaactcccgggaccagctggaaagggtcctctttgacgagctagggcttcccgccatcggcaagacggagaagaccggcaagcgctccaccagcgccgccgtcctggaggccctccgcgaggcccaccccatcgtggagaagatcctgcagtaccgggagctcaccaagctgaagagcacctacattgaccccttgccggacctcatccaccccaggacgggccgcctccacacccgcttcaaccagacggccacggccacgggcaggctaagtagctccgatcccaacctccagaacatccccgtccgcaccccgcttgggcagaggatccgccgggccttcatcgccgaggaggggtggctattggtggccctggactatagccagatagagctcagggtgctggcccacctctccggcgacgagaacctgatccgggtcttccaggaggggcgggacatccacacggagaccgccagctggatgttcggcgtcccccgggaggccgtggaccccctgatgcgccgggcggccaagaccatcaacttcggggtcctctacggcatgtcggcccaccgcctctcccaggagctagccatcccttacgaggaggcccaggccttcattgagcgctactttcagagcttccccaaggtgcgggcctggattgagaagaccctggaggagggcaggaggcgggggtacgtggagaccctcttcggccgccgccgctacgtgccagacctagagcatcgggtgaagagcgtgcgggaggcggccgagcgcatggccttcaacatgcccgtccagggcaccgccgccgacctcatgaagctggctatggtgaagctcttccccaggctggaggaaatgggggccaggatgctccttcaggtccacgacgagctggtcctcgaggccccaaaagagagggcggaggccgtggcccggctggccaaggaggtcatggagggggtgtatcccctggccgtgcccctggaggtggaggtggggataggggaggactggctctccgccaaggagtgataccaccccatgctggcccaagccagcatgggggccccggcaaaaggtttctggggaagttaccaggcatggtgggccgaaggaaacaggaaacaagggtatgagggttttttgccctaaagaaaggccagggggtcctcccgaaggaaggcttccagggggataccccctgggcccaggagtagcccctttcctccaaaggcctgggtgaaggcttttagccctttggtcctttgggaaggggcgcttttgacctccaaagccagaaggcgccttcccttcttcaagacgaagtcaacctcctggtccctttcccgccagtagtacacctcaaagcccccgtgggggccgtgggccagaaggtgggcgcccacggcggtttccacgagccgccccatgagggcggcgtccgcccacacctcctttggggaaagccccaagaccgccgtgatgagccccgtattaagggccaggagcttggggctcgaggcgcggcgccggaagggctcggcggcgtacttctgcag

SEQ ID NO: 3322 - DNA, 3026 bp, Artificial Sequence
  Description of Artificial Sequence: Synthetic DNA sequence of Thermus aquaticus DNA Polymerase A735I
atgagggggatgctgcccctctttgagcccaagggccgggtcctcctggtggacggccaccacctggcctaccgcaccttccacgccctgaagggcctcaccaccagccggggggagccggtgcaggcggtctacggcttcgccaagagcctcctcaaggccctcaaggaggacggggacgcggtgatcgtggtctttgacgccaaggccccctccttccgccacgaggcctacggggggtacaaggcgggccgggcccccacgccggaggactttccccggcaactcgccctcatcaaggagctggtggacctcctggggctggcgcgcctcgaggtcccgggctacgaggcggacgacgtcctggccagcctggccaagaaggcggaaaaggagggctacgaggtccgcatcctcaccgccgacaaagacctttaccagctcctttccgaccgcatccacgccctccaccccgaggggtacctcatcaccccggcctggctttgggaaaagtacggcctgaggcccgaccagtgggccgactaccgggccctgaccggggacgagtccgacaaccttcccggggtcaagggcatcggggagaagacggcgaggaagcttctggaggagtgggggagcctggaagccctcctcaagaacctggaccggctgaagcccgccatccgggagaagatcctggcccacatggacgatctgaagctctcctgggacctggccaaggtgcgcaccgacctgcccctggaggtggacttcgccaaaaggcgggagcccgaccgggagaggcttagggcctttctggagaggcttgagtttggcagcctcctccacgagttcggccttctggaaagccccaaggccctggaggaggccccctggcccccgccggaaggggccttcgtgggctttgtgctttcccgcaaggagcccatgtgggccgatcttctggccctggccgccgccagggggggccgggtccaccgggcccccgagccttataaagccctcagggacctgaaggaggcgcgggggcttctcgccaaagacctgagcgttctggccctgagggaaggccttggcctcccgcccggcgacgaccccatgctcctcgcctacctcctggacccttccaacaccacccccgagggggtggcccggcgctacggcggggagtggacggaggaggcgggggagcgggccgccctttccgagaggctcttcgccaacctgtgggggaggcttgagggggaggagaggctcctttggctttaccgggaggtggagaggcccctttccgctgtcctggcccacatggaggccacgggggtgcgcctggacgtggcctatctcagggccttgtccctggaggtggccgaggagatcgcccgcctcgaggccgaggtcttccgcctggccggccaccccttcaacctcaactcccgggaccagctggaaagggtcctctttgacgagctagggcttcccgccatcggcaagacggagaagaccggcaagcgctccaccagcgccgccgtcctggaggccctccgcgaggcccaccccatcgtggagaagatcctgcagtaccgggagctcaccaagctgaagagcacctacattgaccccttgccggacctcatccaccccaggacgggccgcctccacacccgcttcaaccagacggccacggccacgggcaggctaagtagctccgatcccaacctccagaacatccccgtccgcaccccgcttgggcagaggatccgccgggccttcatcgccgaggaggggtggctattggtggccctggactatagccagatagagctcagggtgctggcccacctctccggcgacgagaacctgatccgggtcttccaggaggggcgggacatccacacggagaccgccagctggatgttcggcgtcccccgggaggccgtggaccccctgatgcgccgggcggccaagaccatcaacttcggggtcctctacggcatgtcggcccaccgcctctcccaggagctagccatcccttacgaggaggcccaggccttcattgagcgctactttcagagcttccccaaggtgcgggcctggattgagaagaccctggaggagggcaggaggcgggggtacgtggagaccctcttcggccgccgccgctacgtgccagacctagagattcgggtgaagagcgtgcgggaggcggccgagcgcatggccttcaacatgcccgtccagggcaccgccgccgacctcatgaagctggctatggtgaagctcttccccaggctggaggaaatgggggccaggatgctccttcaggtccacgacgagctggtcctcgaggccccaaaagagagggcggaggccgtggcccggctggccaaggaggtcatggagggggtgtatcccctggccgtgcccctggaggtggaggtggggataggggaggactggctctccgccaaggagtgataccaccccatgctggcccaagccagcatgggggccccggcaaaaggtttctggggaagttaccaggcatggtgggccgaaggaaacaggaaacaagggtatgagggttttttgccctaaagaaaggccagggggtcctcccgaaggaaggcttccagggggataccccctgggcccaggagtagcccctttcctccaaaggcctgggtgaaggcttttagccctttggtcctttgggaaggggcgcttttgacctccaaagccagaaggcgccttcccttcttcaagacgaagtcaacctcctggtccctttcccgccagtagtacacctcaaagcccccgtgggggccgtgggccagaaggtgggcgcccacggcggtttccacgagccgccccatgagggcggcgtccgcccacacctcctttggggaaagccccaagaccgccgtgatgagccccgtattaagggccaggagcttggggctcgaggcgcggcgccggaagggctcggcggcgtacttctgcag

SEQ ID NO: 3323 - DNA, 3026 bp, Artificial Sequence
  Description of Artificial Sequence: Synthetic DNA sequence of Thermus aquaticus DNA Polymerase A735L
atgagggggatgctgcccctctttgagcccaagggccgggtcctcctggtggacggccaccacctggcctaccgcaccttccacgccctgaagggcctcaccaccagccggggggagccggtgcaggcggtctacggcttcgccaagagcctcctcaaggccctcaaggaggacggggacgcggtgatcgtggtctttgacgccaaggccccctccttccgccacgaggcctacggggggtacaaggcgggccgggcccccacgccggaggactttccccggcaactcgccctcatcaaggagctggtggacctcctggggctggcgcgcctcgaggtcccgggctacgaggcggacgacgtcctggccagcctggccaagaaggcggaaaaggagggctacgaggtccgcatcctcaccgccgacaaagacctttaccagctcctttccgaccgcatccacgccctccaccccgaggggtacctcatcaccccggcctggctttgggaaaagtacggcctgaggcccgaccagtgggccgactaccgggccctgaccggggacgagtccgacaaccttcccggggtcaagggcatcggggagaagacggcgaggaagcttctggaggagtgggggagcctggaagccctcctcaagaacctggaccggctgaagcccgccatccgggagaagatcctggcccacatggacgatctgaagctctcctgggacctggccaaggtgcgcaccgacctgcccctggaggtggacttcgccaaaaggcgggagcccgaccgggagaggcttagggcctttctggagaggcttgagtttggcagcctcctccacgagttcggccttctggaaagccccaaggccctggaggaggccccctggcccccgccggaaggggccttcgtgggctttgtgctttcccgcaaggagcccatgtgggccgatcttctggccctggccgccgccagggggggccgggtccaccgggcccccgagccttataaagccctcagggacctgaaggaggcgcgggggcttctcgccaaagacctgagcgttctggccctgagggaaggccttggcctcccgcccggcgacgaccccatgctcctcgcctacctcctggacccttccaacaccacccccgagggggtggcccggcgctacggcggggagtggacggaggaggcgggggagcgggccgccctttccgagaggctcttcgccaacctgtgggggaggcttgagggggaggagaggctcctttggctttaccgggaggtggagaggcccctttccgctgtcctggcccacatggaggccacgggggtgcgcctggacgtggcctatctcagggccttgtccctggaggtggccgaggagatcgcccgcctcgaggccgaggtcttccgcctggccggccaccccttcaacctcaactcccgggaccagctggaaagggtcctctttgacgagctagggcttcccgccatcggcaagacggagaagaccggcaagcgctccaccagcgccgccgtcctggaggccctccgcgaggcccaccccatcgtggagaagatcctgcagtaccgggagctcaccaagctgaagagcacctacattgaccccttgccggacctcatccaccccaggacgggccgcctccacacccgcttcaaccagacggccacggccacgggcaggctaagtagctccgatcccaacctccagaacatccccgtccgcaccccgcttgggcagaggatccgccgggccttcatcgccgaggaggggtggctattggtggccctggactatagccagatagagctcagggtgctggcccacctctccggcgacgagaacctgatccgggtcttccaggaggggcgggacatccacacggagaccgccagctggatgttcggcgtcccccgggaggccgtggaccccctgatgcgccgggcggccaagaccatcaacttcggggtcctctacggcatgtcggcccaccgcctctcccaggagctagccatcccttacgaggaggcccaggccttcattgagcgctactttcagagcttccccaaggtgcgggcctggattgagaagaccctggaggagggcaggaggcgggggtacgtggagaccctcttcggccgccgccgctacgtgccagacctagagttacgggtgaagagcgtgcgggaggcggccgagcgcatggccttcaacatgcccgtccagggcaccgccgccgacctcatgaagctggctatggtgaagctcttccccaggctggaggaaatgggggccaggatgctccttcaggtccacgacgagctggtcctcgaggccccaaaagagagggcggaggccgtggcccggctggccaaggaggtcatggagggggtgtatcccctggccgtgcccctggaggtggaggtggggataggggaggactggctctccgccaaggagtgataccaccccatgctggcccaagccagcatgggggccccggcaaaaggtttctggggaagttaccaggcatggtgggccgaaggaaacaggaaacaagggtatgagggttttttgccctaaagaaaggccagggggtcctcccgaaggaaggcttccagggggataccccctgggcccaggagtagcccctttcctccaaaggcctgggtgaaggcttttagccctttggtcctttgggaaggggcgcttttgacctccaaagccagaaggcgccttcccttcttcaagacgaagtcaacctcctggtccctttcccgccagtagtacacctcaaagcccccgtgggggccgtgggccagaaggtgggcgcccacggcggtttccacgagccgccccatgagggcggcgtccgcccacacctcctttggggaaagccccaagaccgccgtgatgagccccgtattaagggccaggagcttggggctcgaggcgcggcgccggaagggctcggcggcgtacttctgcag

SEQ ID NO: 3324 - DNA, 3026 bp, Artificial Sequence
  Description of Artificial Sequence: Synthetic DNA sequence of Thermus aquaticus DNA Polymerase A735K
atgagggggatgctgcccctctttgagcccaagggccgggtcctcctggtggacggccaccacctggcctaccgcaccttccacgccctgaagggcctcaccaccagccggggggagccggtgcaggcggtctacggcttcgccaagagcctcctcaaggccctcaaggaggacggggacgcggtgatcgtggtctttgacgccaaggccccctccttccgccacgaggcctacggggggtacaaggcgggccgggcccccacgccggaggactttccccggcaactcgccctcatcaaggagctggtggacctcctggggctggcgcgcctcgaggtcccgggctacgaggcggacgacgtcctggccagcctggccaagaaggcggaaaaggagggctacgaggtccgcatcctcaccgccgacaaagacctttaccagctcctttccgaccgcatccacgccctccaccccgaggggtacctcatcaccccggcctggctttgggaaaagtacggcctgaggcccgaccagtgggccgactaccgggccctgaccggggacgagtccgacaaccttcccggggtcaagggcatcggggagaagacggcgaggaagcttctggaggagtgggggagcctggaagccctcctcaagaacctggaccggctgaagcccgccatccgggagaagatcctggcccacatggacgatctgaagctctcctgggacctggccaaggtgcgcaccgacctgcccctggaggtggacttcgccaaaaggcgggagcccgaccgggagaggcttagggcctttctggagaggcttgagtttggcagcctcctccacgagttcggccttctggaaagccccaaggccctggaggaggccccctggcccccgccggaaggggccttcgtgggctttgtgctttcccgcaaggagcccatgtgggccgatcttctggccctggccgccgccagggggggccgggtccaccgggcccccgagccttataaagccctcagggacctgaaggaggcgcgggggcttctcgccaaagacctgagcgttctggccctgagggaaggccttggcctcccgcccggcgacgaccccatgctcctcgcctacctcctggacccttccaacaccacccccgagggggtggcccggcgctacggcggggagtggacggaggaggcgggggagcgggccgccctttccgagaggctcttcgccaacctgtgggggaggcttgagggggaggagaggctcctttggctttaccgggaggtggagaggcccctttccgctgtcctggcccacatggaggccacgggggtgcgcctggacgtggcctatctcagggccttgtccctggaggtggccgaggagatcgcccgcctcgaggccgaggtcttccgcctggccggccaccccttcaacctcaactcccgggaccagctggaaagggtcctctttgacgagctagggcttcccgccatcggcaagacggagaagaccggcaagcgctccaccagcgccgccgtcctggaggccctccgcgaggcccaccccatcgtggagaagatcctgcagtaccgggagctcaccaagctgaagagcacctacattgaccccttgccggacctcatccaccccaggacgggccgcctccacacccgcttcaaccagacggccacggccacgggcaggctaagtagctccgatcccaacctccagaacatccccgtccgcaccccgcttgggcagaggatccgccgggccttcatcgccgaggaggggtggctattggtggccctggactatagccagatagagctcagggtgctggcccacctctccggcgacgagaacctgatccgggtcttccaggaggggcgggacatccacacggagaccgccagctggatgttcggcgtcccccgggaggccgtggaccccctgatgcgccgggcggccaagaccatcaacttcggggtcctctacggcatgtcggcccaccgcctctcccaggagctagccatcccttacgaggaggcccaggccttcattgagcgctactttcagagcttccccaaggtgcgggcctggattgagaagaccctggaggagggcaggaggcgggggtacgtggagaccctcttcggccgccgccgctacgtgccagacctagagaaacgggtgaagagcgtgcgggaggcggccgagcgcatggccttcaacatgcccgtccagggcaccgccgccgacctcatgaagctggctatggtgaagctcttccccaggctggaggaaatgggggccaggatgctccttcaggtccacgacgagctggtcctcgaggccccaaaagagagggcggaggccgtggcccggctggccaaggaggtcatggagggggtgtatcccctggccgtgcccctggaggtggaggtggggataggggaggactggctctccgccaaggagtgataccaccccatgctggcccaagccagcatgggggccccggcaaaaggtttctggggaagttaccaggcatggtgggccgaaggaaacaggaaacaagggtatgagggttttttgccctaaagaaaggccagggggtcctcccgaaggaaggcttccagggggataccccctgggcccaggagtagcccctttcctccaaaggcctgggtgaaggcttttagccctttggtcctttgggaaggggcgcttttgacctccaaagccagaaggcgccttcccttcttcaagacgaagtcaacctcctggtccctttcccgccagtagtacacctcaaagcccccgtgggggccgtgggccagaaggtgggcgcccacggcggtttccacgagccgccccatgagggcggcgtccgcccacacctcctttggggaaagccccaagaccgccgtgatgagccccgtattaagggccaggagcttggggctcgaggcgcggcgccggaagggctcggcggcgtacttctgcag

SEQ ID NO: 3325 - DNA, 3026 bp, Artificial Sequence
  Description of Artificial Sequence: Synthetic DNA sequence of Thermus aquaticus DNA Polymerase A735E
atgagggggatgctgcccctctttgagcccaagggccgggtcctcctggtggacggccaccacctggcctaccgcaccttccacgccctgaagggcctcaccaccagccggggggagccggtgcaggcggtctacggcttcgccaagagcctcctcaaggccctcaaggaggacggggacgcggtgatcgtggtctttgacgccaaggccccctccttccgccacgaggcctacggggggtacaaggcgggccgggcccccacgccggaggactttccccggcaactcgccctcatcaaggagctggtggacctcctggggctggcgcgcctcgaggtcccgggctacgaggcggacgacgtcctggccagcctggccaagaaggcggaaaaggagggctacgaggtccgcatcctcaccgccgacaaagacctttaccagctcctttccgaccgcatccacgccctccaccccgaggggtacctcatcaccccggcctggctttgggaaaagtacggcctgaggcccgaccagtgggccgactaccgggccctgaccggggacgagtccgacaaccttcccggggtcaagggcatcggggagaagacggcgaggaagcttctggaggagtgggggagcctggaagccctcctcaagaacctggaccggctgaagcccgccatccgggagaagatcctggcccacatggacgatctgaagctctcctgggacctggccaaggtgcgcaccgacctgcccctggaggtggacttcgccaaaaggcgggagcccgaccgggagaggcttagggcctttctggagaggcttgagtttggcagcctcctccacgagttcggccttctggaaagccccaaggccctggaggaggccccctggcccccgccggaaggggccttcgtgggctttgtgctttcccgcaaggagcccatgtgggccgatcttctggccctggccgccgccagggggggccgggtccaccgggcccccgagccttataaagccctcagggacctgaaggaggcgcgggggcttctcgccaaagacctgagcgttctggccctgagggaaggccttggcctcccgcccggcgacgaccccatgctcctcgcctacctcctggacccttccaacaccacccccgagggggtggcccggcgctacggcggggagtggacggaggaggcgggggagcgggccgccctttccgagaggctcttcgccaacctgtgggggaggcttgagggggaggagaggctcctttggctttaccgggaggtggagaggcccctttccgctgtcctggcccacatggaggccacgggggtgcgcctggacgtggcctatctcagggccttgtccctggaggtggccgaggagatcgcccgcctcgaggccgaggtcttccgcctggccggccaccccttcaacctcaactcccgggaccagctggaaagggtcctctttgacgagctagggcttcccgccatcggcaagacggagaagaccggcaagcgctccaccagcgccgccgtcctggaggccctccgcgaggcccaccccatcgtggagaagatcctgcagtaccgggagctcaccaagctgaagagcacctacattgaccccttgccggacctcatccaccccaggacgggccgcctccacacccgcttcaaccagacggccacggccacgggcaggctaagtagctccgatcccaacctccagaacatccccgtccgcaccccgcttgggcagaggatccgccgggccttcatcgccgaggaggggtggctattggtggccctggactatagccagatagagctcagggtgctggcccacctctccggcgacgagaacctgatccgggtcttccaggaggggcgggacatccacacggagaccgccagctggatgttcggcgtcccccgggaggccgtggaccccctgatgcgccgggcggccaagaccatcaacttcggggtcctctacggcatgtcggcccaccgcctctcccaggagctagccatcccttacgaggaggcccaggccttcattgagcgctactttcagagcttccccaaggtgcgggcctggattgagaagaccctggaggagggcaggaggcgggggtacgtggagaccctcttcggccgccgccgctacgtgccagacctagaggaacgggtgaagagcgtgcgggaggcggccgagcgcatggccttcaacatgcccgtccagggcaccgccgccgacctcatgaagctggctatggtgaagctcttccccaggctggaggaaatgggggccaggatgctccttcaggtccacgacgagctggtcctcgaggccccaaaagagagggcggaggccgtggcccggctggccaaggaggtcatggagggggtgtatcccctggccgtgcccctggaggtggaggtggggataggggaggactggctctccgccaaggagtgataccaccccatgctggcccaagccagcatgggggccccggcaaaaggtttctggggaagttaccaggcatggtgggccgaaggaaacaggaaacaagggtatgagggttttttgccctaaagaaaggccagggggtcctcccgaaggaaggcttccagggggataccccctgggcccaggagtagcccctttcctccaaaggcctgggtgaaggcttttagccctttggtcctttgggaaggggcgcttttgacctccaaagccagaaggcgccttcccttcttcaagacgaagtcaacctcctggtccctttcccgccagtagtacacctcaaagcccccgtgggggccgtgggccagaaggtgggcgcccacggcggtttccacgagccgccccatgagggcggcgtccgcccacacctcctttggggaaagccccaagaccgccgtgatgagccccgtattaagggccaggagcttggggctcgaggcgcggcgccggaagggctcggcggcgtacttctgcag

SEQ ID NO: 3326 - DNA, 3026 bp, Artificial Sequence
  Description of Artificial Sequence: Synthetic DNA sequence of Thermus aquaticus DNA Polymerase A735D
atgagggggatgctgcccctctttgagcccaagggccgggtcctcctggtggacggccaccacctggcctaccgcaccttccacgccctgaagggcctcaccaccagccggggggagccggtgcaggcggtctacggcttcgccaagagcctcctcaaggccctcaaggaggacggggacgcggtgatcgtggtctttgacgccaaggccccctccttccgccacgaggcctacggggggtacaaggcgggccgggcccccacgccggaggactttccccggcaactcgccctcatcaaggagctggtggacctcctggggctggcgcgcctcgaggtcccgggctacgaggcggacgacgtcctggccagcctggccaagaaggcggaaaaggagggctacgaggtccgcatcctcaccgccgacaaagacctttaccagctcctttccgaccgcatccacgccctccaccccgaggggtacctcatcaccccggcctggctttgggaaaagtacggcctgaggcccgaccagtgggccgactaccgggccctgaccggggacgagtccgacaaccttcccggggtcaagggcatcggggagaagacggcgaggaagcttctggaggagtgggggagcctggaagccctcctcaagaacctggaccggctgaagcccgccatccgggagaagatcctggcccacatggacgatctgaagctctcctgggacctggccaaggtgcgcaccgacctgcccctggaggtggacttcgccaaaaggcgggagcccgaccgggagaggcttagggcctttctggagaggcttgagtttggcagcctcctccacgagttcggccttctggaaagccccaaggccctggaggaggccccctggcccccgccggaaggggccttcgtgggctttgtgctttcccgcaaggagcccatgtgggccgatcttctggccctggccgccgccagggggggccgggtccaccgggcccccgagccttataaagccctcagggacctgaaggaggcgcgggggcttctcgccaaagacctgagcgttctggccctgagggaaggccttggcctcccgcccggcgacgaccccatgctcctcgcctacctcctggacccttccaacaccacccccgagggggtggcccggcgctacggcggggagtggacggaggaggcgggggagcgggccgccctttccgagaggctcttcgccaacctgtgggggaggcttgagggggaggagaggctcctttggctttaccgggaggtggagaggcccctttccgctgtcctggcccacatggaggccacgggggtgcgcctggacgtggcctatctcagggccttgtccctggaggtggccgaggagatcgcccgcctcgaggccgaggtcttccgcctggccggccaccccttcaacctcaactcccgggaccagctggaaagggtcctctttgacgagctagggcttcccgccatcggcaagacggagaagaccggcaagcgctccaccagcgccgccgtcctggaggccctccgcgaggcccaccccatcgtggagaagatcctgcagtaccgggagctcaccaagctgaagagcacctacattgaccccttgccggacctcatccaccccaggacgggccgcctccacacccgcttcaaccagacggccacggccacgggcaggctaagtagctccgatcccaacctccagaacatccccgtccgcaccccgcttgggcagaggatccgccgggccttcatcgccgaggaggggtggctattggtggccctggactatagccagatagagctcagggtgctggcccacctctccggcgacgagaacctgatccgggtcttccaggaggggcgggacatccacacggagaccgccagctggatgttcggcgtcccccgggaggccgtggaccccctgatgcgccgggcggccaagaccatcaacttcggggtcctctacggcatgtcggcccaccgcctctcccaggagctagccatcccttacgaggaggcccaggccttcattgagcgctactttcagagcttccccaaggtgcgggcctggattgagaagaccctggaggagggcaggaggcgggggtacgtggagaccctcttcggccgccgccgctacgtgccagacctagaggatcgggtgaagagcgtgcgggaggcggccgagcgcatggccttcaacatgcccgtccagggcaccgccgccgacctcatgaagctggctatggtgaagctcttccccaggctggaggaaatgggggccaggatgctccttcaggtccacgacgagctggtcctcgaggccccaaaagagagggcggaggccgtggcccggctggccaaggaggtcatggagggggtgtatcccctggccgtgcccctggaggtggaggtggggataggggaggactggctctccgccaaggagtgataccaccccatgctggcccaagccagcatgggggccccggcaaaaggtttctggggaagttaccaggcatggtgggccgaaggaaacaggaaacaagggtatgagggttttttgccctaaagaaaggccagggggtcctcccgaaggaaggcttccagggggataccccctgggcccaggagtagcccctttcctccaaaggcctgggtgaaggcttttagccctttggtcctttgggaaggggcgcttttgacctccaaagccagaaggcgccttcccttcttcaagacgaagtcaacctcctggtccctttcccgccagtagtacacctcaaagcccccgtgggggccgtgggccagaaggtgggcgcccacggcggtttccacgagccgccccatgagggcggcgtccgcccacacctcctttggggaaagccccaagaccgccgtgatgagccccgtattaagggccaggagcttggggctcgaggcgcggcgccggaagggctcggcggcgtacttctgcag

SEQ ID NO: 3327 - DNA, 3026 bp, Artificial Sequence
  Description of Artificial Sequence: Synthetic DNA sequence of Thermus aquaticus DNA Polymerase A735F
atgagggggatgctgcccctctttgagcccaagggccgggtcctcctggtggacggccaccacctggcctaccgcaccttccacgccctgaagggcctcaccaccagccggggggagccggtgcaggcggtctacggcttcgccaagagcctcctcaaggccctcaaggaggacggggacgcggtgatcgtggtctttgacgccaaggccccctccttccgccacgaggcctacggggggtacaaggcgggccgggcccccacgccggaggactttccccggcaactcgccctcatcaaggagctggtggacctcctggggctggcgcgcctcgaggtcccgggctacgaggcggacgacgtcctggccagcctggccaagaaggcggaaaaggagggctacgaggtccgcatcctcaccgccgacaaagacctttaccagctcctttccgaccgcatccacgccctccaccccgaggggtacctcatcaccccggcctggctttgggaaaagtacggcctgaggcccgaccagtgggccgactaccgggccctgaccggggacgagtccgacaaccttcccggggtcaagggcatcggggagaagacggcgaggaagcttctggaggagtgggggagcctggaagccctcctcaagaacctggaccggctgaagcccgccatccgggagaagatcctggcccacatggacgatctgaagctctcctgggacctggccaaggtgcgcaccgacctgcccctggaggtggacttcgccaaaaggcgggagcccgaccgggagaggcttagggcctttctggagaggcttgagtttggcagcctcctccacgagttcggccttctggaaagccccaaggccctggaggaggccccctggcccccgccggaaggggccttcgtgggctttgtgctttcccgcaaggagcccatgtgggccgatcttctggccctggccgccgccagggggggccgggtccaccgggcccccgagccttataaagccctcagggacctgaaggaggcgcgggggcttctcgccaaagacctgagcgttctggccctgagggaaggccttggcctcccgcccggcgacgaccccatgctcctcgcctacctcctggacccttccaacaccacccccgagggggtggcccggcgctacggcggggagtggacggaggaggcgggggagcgggccgccctttccgagaggctcttcgccaacctgtgggggaggcttgagggggaggagaggctcctttggctttaccgggaggtggagaggcccctttccgctgtcctggcccacatggaggccacgggggtgcgcctggacgtggcctatctcagggccttgtccctggaggtggccgaggagatcgcccgcctcgaggccgaggtcttccgcctggccggccaccccttcaacctcaactcccgggaccagctggaaagggtcctctttgacgagctagggcttcccgccatcggcaagacggagaagaccggcaagcgctccaccagcgccgccgtcctggaggccctccgcgaggcccaccccatcgtggagaagatcctgcagtaccgggagctcaccaagctgaagagcacctacattgaccccttgccggacctcatccaccccaggacgggccgcctccacacccgcttcaaccagacggccacggccacgggcaggctaagtagctccgatcccaacctccagaacatccccgtccgcaccccgcttgggcagaggatccgccgggccttcatcgccgaggaggggtggctattggtggccctggactatagccagatagagctcagggtgctggcccacctctccggcgacgagaacctgatccgggtcttccaggaggggcgggacatccacacggagaccgccagctggatgttcggcgtcccccgggaggccgtggaccccctgatgcgccgggcggccaagaccatcaacttcggggtcctctacggcatgtcggcccaccgcctctcccaggagctagccatcccttacgaggaggcccaggccttcattgagcgctactttcagagcttccccaaggtgcgggcctggattgagaagaccctggaggagggcaggaggcgggggtacgtggagaccctcttcggccgccgccgctacgtgccagacctagagtttcgggtgaagagcgtgcgggaggcggccgagcgcatggccttcaacatgcccgtccagggcaccgccgccgacctcatgaagctggctatggtgaagctcttccccaggctggaggaaatgggggccaggatgctccttcaggtccacgacgagctggtcctcgaggccccaaaagagagggcggaggccgtggcccggctggccaaggaggtcatggagggggtgtatcccctggccgtgcccctggaggtggaggtggggataggggaggactggctctccgccaaggagtgataccaccccatgctggcccaagccagcatgggggccccggcaaaaggtttctggggaagttaccaggcatggtgggccgaaggaaacaggaaacaagggtatgagggttttttgccctaaagaaaggccagggggtcctcccgaaggaaggcttccagggggataccccctgggcccaggagtagcccctttcctccaaaggcctgggtgaaggcttttagccctttggtcctttgggaaggggcgcttttgacctccaaagccagaaggcgccttcccttcttcaagacgaagtcaacctcctggtccctttcccgccagtagtacacctcaaagcccccgtgggggccgtgggccagaaggtgggcgcccacggcggtttccacgagccgccccatgagggcggcgtccgcccacacctcctttggggaaagccccaagaccgccgtgatgagccccgtattaagggccaggagcttggggctcgaggcgcggcgccggaagggctcggcggcgtacttctgcag

SEQ ID NO: 3328 - DNA, 3026 bp, Artificial Sequence
  Description of Artificial Sequence: Synthetic DNA sequence of Thermus aquaticus DNA Polymerase A735S
atgagggggatgctgcccctctttgagcccaagggccgggtcctcctggtggacggccaccacctggcctaccgcaccttccacgccctgaagggcctcaccaccagccggggggagccggtgcaggcggtctacggcttcgccaagagcctcctcaaggccctcaaggaggacggggacgcggtgatcgtggtctttgacgccaaggccccctccttccgccacgaggcctacggggggtacaaggcgggccgggcccccacgccggaggactttccccggcaactcgccctcatcaaggagctggtggacctcctggggctggcgcgcctcgaggtcccgggctacgaggcggacgacgtcctggccagcctggccaagaaggcggaaaaggagggctacgaggtccgcatcctcaccgccgacaaagacctttaccagctcctttccgaccgcatccacgccctccaccccgaggggtacctcatcaccccggcctggctttgggaaaagtacggcctgaggcccgaccagtgggccgactaccgggccctgaccggggacgagtccgacaaccttcccggggtcaagggcatcggggagaagacggcgaggaagcttctggaggagtgggggagcctggaagccctcctcaagaacctggaccggctgaagcccgccatccgggagaagatcctggcccacatggacgatctgaagctctcctgggacctggccaaggtgcgcaccgacctgcccctggaggtggacttcgccaaaaggcgggagcccgaccgggagaggcttagggcctttctggagaggcttgagtttggcagcctcctccacgagttcggccttctggaaagccccaaggccctggaggaggccccctggcccccgccggaaggggccttcgtgggctttgtgctttcccgcaaggagcccatgtgggccgatcttctggccctggccgccgccagggggggccgggtccaccgggcccccgagccttataaagccctcagggacctgaaggaggcgcgggggcttctcgccaaagacctgagcgttctggccctgagggaaggccttggcctcccgcccggcgacgaccccatgctcctcgcctacctcctggacccttccaacaccacccccgagggggtggcccggcgctacggcggggagtggacggaggaggcgggggagcgggccgccctttccgagaggctcttcgccaacctgtgggggaggcttgagggggaggagaggctcctttggctttaccgggaggtggagaggcccctttccgctgtcctggcccacatggaggccacgggggtgcgcctggacgtggcctatctcagggccttgtccctggaggtggccgaggagatcgcccgcctcgaggccgaggtcttccgcctggccggccaccccttcaacctcaactcccgggaccagctggaaagggtcctctttgacgagctagggcttcccgccatcggcaagacggagaagaccggcaagcgctccaccagcgccgccgtcctggaggccctccgcgaggcccaccccatcgtggagaagatcctgcagtaccgggagctcaccaagctgaagagcacctacattgaccccttgccggacctcatccaccccaggacgggccgcctccacacccgcttcaaccagacggccacggccacgggcaggctaagtagctccgatcccaacctccagaacatccccgtccgcaccccgcttgggcagaggatccgccgggccttcatcgccgaggaggggtggctattggtggccctggactatagccagatagagctcagggtgctggcccacctctccggcgacgagaacctgatccgggtcttccaggaggggcgggacatccacacggagaccgccagctggatgttcggcgtcccccgggaggccgtggaccccctgatgcgccgggcggccaagaccatcaacttcggggtcctctacggcatgtcggcccaccgcctctcccaggagctagccatcccttacgaggaggcccaggccttcattgagcgctactttcagagcttccccaaggtgcgggcctggattgagaagaccctggaggagggcaggaggcgggggtacgtggagaccctcttcggccgccgccgctacgtgccagacctagagtctcgggtgaagagcgtgcgggaggcggccgagcgcatggccttcaacatgcccgtccagggcaccgccgccgacctcatgaagctggctatggtgaagctcttccccaggctggaggaaatgggggccaggatgctccttcaggtccacgacgagctggtcctcgaggccccaaaagagagggcggaggccgtggcccggctggccaaggaggtcatggagggggtgtatcccctggccgtgcccctggaggtggaggtggggataggggaggactggctctccgccaaggagtgataccaccccatgctggcccaagccagcatgggggccccggcaaaaggtttctggggaagttaccaggcatggtgggccgaaggaaacaggaaacaagggtatgagggttttttgccctaaagaaaggccagggggtcctcccgaaggaaggcttccagggggataccccctgggcccaggagtagcccctttcctccaaaggcctgggtgaaggcttttagccctttggtcctttgggaaggggcgcttttgacctccaaagccagaaggcgccttcccttcttcaagacgaagtcaacctcctggtccctttcccgccagtagtacacctcaaagcccccgtgggggccgtgggccagaaggtgggcgcccacggcggtttccacgagccgccccatgagggcggcgtccgcccacacctcctttggggaaagccccaagaccgccgtgatgagccccgtattaagggccaggagcttggggctcgaggcgcggcgccggaagggctcggcggcgtacttctgcag

SEQ ID NO: 3329 - DNA, 3026 bp, Artificial Sequence
  Description of Artificial Sequence: Synthetic DNA sequence of Thermus aquaticus DNA Polymerase A735Y
atgagggggatgctgcccctctttgagcccaagggccgggtcctcctggtggacggccaccacctggcctaccgcaccttccacgccctgaagggcctcaccaccagccggggggagccggtgcaggcggtctacggcttcgccaagagcctcctcaaggccctcaaggaggacggggacgcggtgatcgtggtctttgacgccaaggccccctccttccgccacgaggcctacggggggtacaaggcgggccgggcccccacgccggaggactttccccggcaactcgccctcatcaaggagctggtggacctcctggggctggcgcgcctcgaggtcccgggctacgaggcggacgacgtcctggccagcctggccaagaaggcggaaaaggagggctacgaggtccgcatcctcaccgccgacaaagacctttaccagctcctttccgaccgcatccacgccctccaccccgaggggtacctcatcaccccggcctggctttgggaaaagtacggcctgaggcccgaccagtgggccgactaccgggccctgaccggggacgagtccgacaaccttcccggggtcaagggcatcggggagaagacggcgaggaagcttctggaggagtgggggagcctggaagccctcctcaagaacctggaccggctgaagcccgccatccgggagaagatcctggcccacatggacgatctgaagctctcctgggacctggccaaggtgcgcaccgacctgcccctggaggtggacttcgccaaaaggcgggagcccgaccgggagaggcttagggcctttctggagaggcttgagtttggcagcctcctccacgagttcggccttctggaaagccccaaggccctggaggaggccccctggcccccgccggaaggggccttcgtgggctttgtgctttcccgcaaggagcccatgtgggccgatcttctggccctggccgccgccagggggggccgggtccaccgggcccccgagccttataaagccctcagggacctgaaggaggcgcgggggcttctcgccaaagacctgagcgttctggccctgagggaaggccttggcctcccgcccggcgacgaccccatgctcctcgcctacctcctggacccttccaacaccacccccgagggggtggcccggcgctacggcggggagtggacggaggaggcgggggagcgggccgccctttccgagaggctcttcgccaacctgtgggggaggcttgagggggaggagaggctcctttggctttaccgggaggtggagaggcccctttccgctgtcctggcccacatggaggccacgggggtgcgcctggacgtggcctatctcagggccttgtccctggaggtggccgaggagatcgcccgcctcgaggccgaggtcttccgcctggccggccaccccttcaacctcaactcccgggaccagctggaaagggtcctctttgacgagctagggcttcccgccatcggcaagacggagaagaccggcaagcgctccaccagcgccgccgtcctggaggccctccgcgaggcccaccccatcgtggagaagatcctgcagtaccgggagctcaccaagctgaagagcacctacattgaccccttgccggacctcatccaccccaggacgggccgcctccacacccgcttcaaccagacggccacggccacgggcaggctaagtagctccgatcccaacctccagaacatccccgtccgcaccccgcttgggcagaggatccgccgggccttcatcgccgaggaggggtggctattggtggccctggactatagccagatagagctcagggtgctggcccacctctccggcgacgagaacctgatccgggtcttccaggaggggcgggacatccacacggagaccgccagctggatgttcggcgtcccccgggaggccgtggaccccctgatgcgccgggcggccaagaccatcaacttcggggtcctctacggcatgtcggcccaccgcctctcccaggagctagccatcccttacgaggaggcccaggccttcattgagcgctactttcagagcttccccaaggtgcgggcctggattgagaagaccctggaggagggcaggaggcgggggtacgtggagaccctcttcggccgccgccgctacgtgccagacctagagtatcgggtgaagagcgtgcgggaggcggccgagcgcatggccttcaacatgcccgtccagggcaccgccgccgacctcatgaagctggctatggtgaagctcttccccaggctggaggaaatgggggccaggatgctccttcaggtccacgacgagctggtcctcgaggccccaaaagagagggcggaggccgtggcccggctggccaaggaggtcatggagggggtgtatcccctggccgtgcccctggaggtggaggtggggataggggaggactggctctccgccaaggagtgataccaccccatgctggcccaagccagcatgggggccccggcaaaaggtttctggggaagttaccaggcatggtgggccgaaggaaacaggaaacaagggtatgagggttttttgccctaaagaaaggccagggggtcctcccgaaggaaggcttccagggggataccccctgggcccaggagtagcccctttcctccaaaggcctgggtgaaggcttttagccctttggtcctttgggaaggggcgcttttgacctccaaagccagaaggcgccttcccttcttcaagacgaagtcaacctcctggtccctttcccgccagtagtacacctcaaagcccccgtgggggccgtgggccagaaggtgggcgcccacggcggtttccacgagccgccccatgagggcggcgtccgcccacacctcctttggggaaagccccaagaccgccgtgatgagccccgtattaagggccaggagcttggggctcgaggcgcggcgccggaagggctcggcggcgtacttctgcag

SEQ ID NO: 3330 - DNA, 3026 bp, Artificial Sequence
  Description of Artificial Sequence: Synthetic DNA sequence of Thermus aquaticus DNA Polymerase A735W
atgagggggatgctgcccctctttgagcccaagggccgggtcctcctggtggacggccaccacctggcctaccgcaccttccacgccctgaagggcctcaccaccagccggggggagccggtgcaggcggtctacggcttcgccaagagcctcctcaaggccctcaaggaggacggggacgcggtgatcgtggtctttgacgccaaggccccctccttccgccacgaggcctacggggggtacaaggcgggccgggcccccacgccggaggactttccccggcaactcgccctcatcaaggagctggtggacctcctggggctggcgcgcctcgaggtcccgggctacgaggcggacgacgtcctggccagcctggccaagaaggcggaaaaggagggctacgaggtccgcatcctcaccgccgacaaagacctttaccagctcctttccgaccgcatccacgccctccaccccgaggggtacctcatcaccccggcctggctttgggaaaagtacggcctgaggcccgaccagtgggccgactaccgggccctgaccggggacgagtccgacaaccttcccggggtcaagggcatcggggagaagacggcgaggaagcttctggaggagtgggggagcctggaagccctcctcaagaacctggaccggctgaagcccgccatccgggagaagatcctggcccacatggacgatctgaagctctcctgggacctggccaaggtgcgcaccgacctgcccctggaggtggacttcgccaaaaggcgggagcccgaccgggagaggcttagggcctttctggagaggcttgagtttggcagcctcctccacgagttcggccttctggaaagccccaaggccctggaggaggccccctggcccccgccggaaggggccttcgtgggctttgtgctttcccgcaaggagcccatgtgggccgatcttctggccctggccgccgccagggggggccgggtccaccgggcccccgagccttataaagccctcagggacctgaaggaggcgcgggggcttctcgccaaagacctgagcgttctggccctgagggaaggccttggcctcccgcccggcgacgaccccatgctcctcgcctacctcctggacccttccaacaccacccccgagggggtggcccggcgctacggcggggagtggacggaggaggcgggggagcgggccgccctttccgagaggctcttcgccaacctgtgggggaggcttgagggggaggagaggctcctttggctttaccgggaggtggagaggcccctttccgctgtcctggcccacatggaggccacgggggtgcgcctggacgtggcctatctcagggccttgtccctggaggtggccgaggagatcgcccgcctcgaggccgaggtcttccgcctggccggccaccccttcaacctcaactcccgggaccagctggaaagggtcctctttgacgagctagggcttcccgccatcggcaagacggagaagaccggcaagcgctccaccagcgccgccgtcctggaggccctccgcgaggcccaccccatcgtggagaagatcctgcagtaccgggagctcaccaagctgaagagcacctacattgaccccttgccggacctcatccaccccaggacgggccgcctccacacccgcttcaaccagacggccacggccacgggcaggctaagtagctccgatcccaacctccagaacatccccgtccgcaccccgcttgggcagaggatccgccgggccttcatcgccgaggaggggtggctattggtggccctggactatagccagatagagctcagggtgctggcccacctctccggcgacgagaacctgatccgggtcttccaggaggggcgggacatccacacggagaccgccagctggatgttcggcgtcccccgggaggccgtggaccccctgatgcgccgggcggccaagaccatcaacttcggggtcctctacggcatgtcggcccaccgcctctcccaggagctagccatcccttacgaggaggcccaggccttcattgagcgctactttcagagcttccccaaggtgcgggcctggattgagaagaccctggaggagggcaggaggcgggggtacgtggagaccctcttcggccgccgccgctacgtgccagacctagagtggcgggtgaagagcgtgcgggaggcggccgagcgcatggccttcaacatgcccgtccagggcaccgccgccgacctcatgaagctggctatggtgaagctcttccccaggctggaggaaatgggggccaggatgctccttcaggtccacgacgagctggtcctcgaggccccaaaagagagggcggaggccgtggcccggctggccaaggaggtcatggagggggtgtatcccctggccgtgcccctggaggtggaggtggggataggggaggactggctctccgccaaggagtgataccaccccatgctggcccaagccagcatgggggccccggcaaaaggtttctggggaagttaccaggcatggtgggccgaaggaaacaggaaacaagggtatgagggttttttgccctaaagaaaggccagggggtcctcccgaaggaaggcttccagggggataccccctgggcccaggagtagcccctttcctccaaaggcctgggtgaaggcttttagccctttggtcctttgggaaggggcgcttttgacctccaaagccagaaggcgccttcccttcttcaagacgaagtcaacctcctggtccctttcccgccagtagtacacctcaaagcccccgtgggggccgtgggccagaaggtgggcgcccacggcggtttccacgagccgccccatgagggcggcgtccgcccacacctcctttggggaaagccccaagaccgccgtgatgagccccgtattaagggccaggagcttggggctcgaggcgcggcgccggaagggctcggcggcgtacttctgcag

SEQ ID NO: 3331 - DNA, 3026 bp, Artificial Sequence
  Description of Artificial Sequence: Synthetic DNA sequence of Thermus aquaticus DNA Polymerase A735P
atgagggggatgctgcccctctttgagcccaagggccgggtcctcctggtggacggccaccacctggcctaccgcaccttccacgccctgaagggcctcaccaccagccggggggagccggtgcaggcggtctacggcttcgccaagagcctcctcaaggccctcaaggaggacggggacgcggtgatcgtggtctttgacgccaaggccccctccttccgccacgaggcctacggggggtacaaggcgggccgggcccccacgccggaggactttccccggcaactcgccctcatcaaggagctggtggacctcctggggctggcgcgcctcgaggtcccgggctacgaggcggacgacgtcctggccagcctggccaagaaggcggaaaaggagggctacgaggtccgcatcctcaccgccgacaaagacctttaccagctcctttccgaccgcatccacgccctccaccccgaggggtacctcatcaccccggcctggctttgggaaaagtacggcctgaggcccgaccagtgggccgactaccgggccctgaccggggacgagtccgacaaccttcccggggtcaagggcatcggggagaagacggcgaggaagcttctggaggagtgggggagcctggaagccctcctcaagaacctggaccggctgaagcccgccatccgggagaagatcctggcccacatggacgatctgaagctctcctgggacctggccaaggtgcgcaccgacctgcccctggaggtggacttcgccaaaaggcgggagcccgaccgggagaggcttagggcctttctggagaggcttgagtttggcagcctcctccacgagttcggccttctggaaagccccaaggccctggaggaggccccctggcccccgccggaaggggccttcgtgggctttgtgctttcccgcaaggagcccatgtgggccgatcttctggccctggccgccgccagggggggccgggtccaccgggcccccgagccttataaagccctcagggacctgaaggaggcgcgggggcttctcgccaaagacctgagcgttctggccctgagggaaggccttggcctcccgcccggcgacgaccccatgctcctcgcctacctcctggacccttccaacaccacccccgagggggtggcccggcgctacggcggggagtggacggaggaggcgggggagcgggccgccctttccgagaggctcttcgccaacctgtgggggaggcttgagggggaggagaggctcctttggctttaccgggaggtggagaggcccctttccgctgtcctggcccacatggaggccacgggggtgcgcctggacgtggcctatctcagggccttgtccctggaggtggccgaggagatcgcccgcctcgaggccgaggtcttccgcctggccggccaccccttcaacctcaactcccgggaccagctggaaagggtcctctttgacgagctagggcttcccgccatcggcaagacggagaagaccggcaagcgctccaccagcgccgccgtcctggaggccctccgcgaggcccaccccatcgtggagaagatcctgcagtaccgggagctcaccaagctgaagagcacctacattgaccccttgccggacctcatccaccccaggacgggccgcctccacacccgcttcaaccagacggccacggccacgggcaggctaagtagctccgatcccaacctccagaacatccccgtccgcaccccgcttgggcagaggatccgccgggccttcatcgccgaggaggggtggctattggtggccctggactatagccagatagagctcagggtgctggcccacctctccggcgacgagaacctgatccgggtcttccaggaggggcgggacatccacacggagaccgccagctggatgttcggcgtcccccgggaggccgtggaccccctgatgcgccgggcggccaagaccatcaacttcggggtcctctacggcatgtcggcccaccgcctctcccaggagctagccatcccttacgaggaggcccaggccttcattgagcgctactttcagagcttccccaaggtgcgggcctggattgagaagaccctggaggagggcaggaggcgggggtacgtggagaccctcttcggccgccgccgctacgtgccagacctagagcctcgggtgaagagcgtgcgggaggcggccgagcgcatggccttcaacatgcccgtccagggcaccgccgccgacctcatgaagctggctatggtgaagctcttccccaggctggaggaaatgggggccaggatgctccttcaggtccacgacgagctggtcctcgaggccccaaaagagagggcggaggccgtggcccggctggccaaggaggtcatggagggggtgtatcccctggccgtgcccctggaggtggaggtggggataggggaggactggctctccgccaaggagtgataccaccccatgctggcccaagccagcatgggggccccggcaaaaggtttctggggaagttaccaggcatggtgggccgaaggaaacaggaaacaagggtatgagggttttttgccctaaagaaaggccagggggtcctcccgaaggaaggcttccagggggataccccctgggcccaggagtagcccctttcctccaaaggcctgggtgaaggcttttagccctttggtcctttgggaaggggcgcttttgacctccaaagccagaaggcgccttcccttcttcaagacgaagtcaacctcctggtccctttcccgccagtagtacacctcaaagcccccgtgggggccgtgggccagaaggtgggcgcccacggcggtttccacgagccgccccatgagggcggcgtccgcccacacctcctttggggaaagccccaagaccgccgtgatgagccccgtattaagggccaggagcttggggctcgaggcgcggcgccggaagggctcggcggcgtacttctgcag

SEQ ID NO: 3332 - DNA, 3026 bp, Artificial Sequence
  Description of Artificial Sequence: Synthetic DNA sequence of Thermus aquaticus DNA Polymerase A735M
atgagggggatgctgcccctctttgagcccaagggccgggtcctcctggtggacggccaccacctggcctaccgcaccttccacgccctgaagggcctcaccaccagccggggggagccggtgcaggcggtctacggcttcgccaagagcctcctcaaggccctcaaggaggacggggacgcggtgatcgtggtctttgacgccaaggccccctccttccgccacgaggcctacggggggtacaaggcgggccgggcccccacgccggaggactttccccggcaactcgccctcatcaaggagctggtggacctcctggggctggcgcgcctcgaggtcccgggctacgaggcggacgacgtcctggccagcctggccaagaaggcggaaaaggagggctacgaggtccgcatcctcaccgccgacaaagacctttaccagctcctttccgaccgcatccacgccctccaccccgaggggtacctcatcaccccggcctggctttgggaaaagtacggcctgaggcccgaccagtgggccgactaccgggccctgaccggggacgagtccgacaaccttcccggggtcaagggcatcggggagaagacggcgaggaagcttctggaggagtgggggagcctggaagccctcctcaagaacctggaccggctgaagcccgccatccgggagaagatcctggcccacatggacgatctgaagctctcctgggacctggccaaggtgcgcaccgacctgcccctggaggtggacttcgccaaaaggcgggagcccgaccgggagaggcttagggcctttctggagaggcttgagtttggcagcctcctccacgagttcggccttctggaaagccccaaggccctggaggaggccccctggcccccgccggaaggggccttcgtgggctttgtgctttcccgcaaggagcccatgtgggccgatcttctggccctggccgccgccagggggggccgggtccaccgggcccccgagccttataaagccctcagggacctgaaggaggcgcgggggcttctcgccaaagacctgagcgttctggccctgagggaaggccttggcctcccgcccggcgacgaccccatgctcctcgcctacctcctggacccttccaacaccacccccgagggggtggcccggcgctacggcggggagtggacggaggaggcgggggagcgggccgccctttccgagaggctcttcgccaacctgtgggggaggcttgagggggaggagaggctcctttggctttaccgggaggtggagaggcccctttccgctgtcctggcccacatggaggccacgggggtgcgcctggacgtggcctatctcagggccttgtccctggaggtggccgaggagatcgcccgcctcgaggccgaggtcttccgcctggccggccaccccttcaacctcaactcccgggaccagctggaaagggtcctctttgacgagctagggcttcccgccatcggcaagacggagaagaccggcaagcgctccaccagcgccgccgtcctggaggccctccgcgaggcccaccccatcgtggagaagatcctgcagtaccgggagctcaccaagctgaagagcacctacattgaccccttgccggacctcatccaccccaggacgggccgcctccacacccgcttcaaccagacggccacggccacgggcaggctaagtagctccgatcccaacctccagaacatccccgtccgcaccccgcttgggcagaggatccgccgggccttcatcgccgaggaggggtggctattggtggccctggactatagccagatagagctcagggtgctggcccacctctccggcgacgagaacctgatccgggtcttccaggaggggcgggacatccacacggagaccgccagctggatgttcggcgtcccccgggaggccgtggaccccctgatgcgccgggcggccaagaccatcaacttcggggtcctctacggcatgtcggcccaccgcctctcccaggagctagccatcccttacgaggaggcccaggccttcattgagcgctactttcagagcttccccaaggtgcgggcctggattgagaagaccctggaggagggcaggaggcgggggtacgtggagaccctcttcggccgccgccgctacgtgccagacctagagatgcgggtgaagagcgtgcgggaggcggccgagcgcatggccttcaacatgcccgtccagggcaccgccgccgacctcatgaagctggctatggtgaagctcttccccaggctggaggaaatgggggccaggatgctccttcaggtccacgacgagctggtcctcgaggccccaaaagagagggcggaggccgtggcccggctggccaaggaggtcatggagggggtgtatcccctggccgtgcccctggaggtggaggtggggataggggaggactggctctccgccaaggagtgataccaccccatgctggcccaagccagcatgggggccccggcaaaaggtttctggggaagttaccaggcatggtgggccgaaggaaacaggaaacaagggtatgagggttttttgccctaaagaaaggccagggggtcctcccgaaggaaggcttccagggggataccccctgggcccaggagtagcccctttcctccaaaggcctgggtgaaggcttttagccctttggtcctttgggaaggggcgcttttgacctccaaagccagaaggcgccttcccttcttcaagacgaagtcaacctcctggtccctttcccgccagtagtacacctcaaagcccccgtgggggccgtgggccagaaggtgggcgcccacggcggtttccacgagccgccccatgagggcggcgtccgcccacacctcctttggggaaagccccaagaccgccgtgatgagccccgtattaagggccaggagcttggggctcgaggcgcggcgccggaagggctcggcggcgtacttctgcag

SEQ ID NO: 3333 - DNA, 3026 bp, Artificial Sequence
  Description of Artificial Sequence: Synthetic DNA sequence of Thermus aquaticus DNA Polymerase A735T
atgagggggatgctgcccctctttgagcccaagggccgggtcctcctggtggacggccaccacctggcctaccgcaccttccacgccctgaagggcctcaccaccagccggggggagccggtgcaggcggtctacggcttcgccaagagcctcctcaaggccctcaaggaggacggggacgcggtgatcgtggtctttgacgccaaggccccctccttccgccacgaggcctacggggggtacaaggcgggccgggcccccacgccggaggactttccccggcaactcgccctcatcaaggagctggtggacctcctggggctggcgcgcctcgaggtcccgggctacgaggcggacgacgtcctggccagcctggccaagaaggcggaaaaggagggctacgaggtccgcatcctcaccgccgacaaagacctttaccagctcctttccgaccgcatccacgccctccaccccgaggggtacctcatcaccccggcctggctttgggaaaagtacggcctgaggcccgaccagtgggccgactaccgggccctgaccggggacgagtccgacaaccttcccggggtcaagggcatcggggagaagacggcgaggaagcttctggaggagtgggggagcctggaagccctcctcaagaacctggaccggctgaagcccgccatccgggagaagatcctggcccacatggacgatctgaagctctcctgggacctggccaaggtgcgcaccgacctgcccctggaggtggacttcgccaaaaggcgggagcccgaccgggagaggcttagggcctttctggagaggcttgagtttggcagcctcctccacgagttcggccttctggaaagccccaaggccctggaggaggccccctggcccccgccggaaggggccttcgtgggctttgtgctttcccgcaaggagcccatgtgggccgatcttctggccctggccgccgccagggggggccgggtccaccgggcccccgagccttataaagccctcagggacctgaaggaggcgcgggggcttctcgccaaagacctgagcgttctggccctgagggaaggccttggcctcccgcccggcgacgaccccatgctcctcgcctacctcctggacccttccaacaccacccccgagggggtggcccggcgctacggcggggagtggacggaggaggcgggggagcgggccgccctttccgagaggctcttcgccaacctgtgggggaggcttgagggggaggagaggctcctttggctttaccgggaggtggagaggcccctttccgctgtcctggcccacatggaggccacgggggtgcgcctggacgtggcctatctcagggccttgtccctggaggtggccgaggagatcgcccgcctcgaggccgaggtcttccgcctggccggccaccccttcaacctcaactcccgggaccagctggaaagggtcctctttgacgagctagggcttcccgccatcggcaagacggagaagaccggcaagcgctccaccagcgccgccgtcctggaggccctccgcgaggcccaccccatcgtggagaagatcctgcagtaccgggagctcaccaagctgaagagcacctacattgaccccttgccggacctcatccaccccaggacgggccgcctccacacccgcttcaaccagacggccacggccacgggcaggctaagtagctccgatcccaacctccagaacatccccgtccgcaccccgcttgggcagaggatccgccgggccttcatcgccgaggaggggtggctattggtggccctggactatagccagatagagctcagggtgctggcccacctctccggcgacgagaacctgatccgggtcttccaggaggggcgggacatccacacggagaccgccagctggatgttcggcgtcccccgggaggccgtggaccccctgatgcgccgggcggccaagaccatcaacttcggggtcctctacggcatgtcggcccaccgcctctcccaggagctagccatcccttacgaggaggcccaggccttcattgagcgctactttcagagcttccccaaggtgcgggcctggattgagaagaccctggaggagggcaggaggcgggggtacgtggagaccctcttcggccgccgccgctacgtgccagacctagagactcgggtgaagagcgtgcgggaggcggccgagcgcatggccttcaacatgcccgtccagggcaccgccgccgacctcatgaagctggctatggtgaagctcttccccaggctggaggaaatgggggccaggatgctccttcaggtccacgacgagctggtcctcgaggccccaaaagagagggcggaggccgtggcccggctggccaaggaggtcatggagggggtgtatcccctggccgtgcccctggaggtggaggtggggataggggaggactggctctccgccaaggagtgataccaccccatgctggcccaagccagcatgggggccccggcaaaaggtttctggggaagttaccaggcatggtgggccgaaggaaacaggaaacaagggtatgagggttttttgccctaaagaaaggccagggggtcctcccgaaggaaggcttccagggggataccccctgggcccaggagtagcccctttcctccaaaggcctgggtgaaggcttttagccctttggtcctttgggaaggggcgcttttgacctccaaagccagaaggcgccttcccttcttcaagacgaagtcaacctcctggtccctttcccgccagtagtacacctcaaagcccccgtgggggccgtgggccagaaggtgggcgcccacggcggtttccacgagccgccccatgagggcggcgtccgcccacacctcctttggggaaagccccaagaccgccgtgatgagccccgtattaagggccaggagcttggggctcgaggcgcggcgccggaagggctcggcggcgtacttctgcag

SEQ ID NO: 3334 - DNA, 3026 bp, Artificial Sequence
  Description of Artificial Sequence: Synthetic DNA sequence of Thermus aquaticus DNA Polymerase A735N
atgagggggatgctgcccctctttgagcccaagggccgggtcctcctggtggacggccaccacctggcctaccgcaccttccacgccctgaagggcctcaccaccagccggggggagccggtgcaggcggtctacggcttcgccaagagcctcctcaaggccctcaaggaggacggggacgcggtgatcgtggtctttgacgccaaggccccctccttccgccacgaggcctacggggggtacaaggcgggccgggcccccacgccggaggactttccccggcaactcgccctcatcaaggagctggtggacctcctggggctggcgcgcctcgaggtcccgggctacgaggcggacgacgtcctggccagcctggccaagaaggcggaaaaggagggctacgaggtccgcatcctcaccgccgacaaagacctttaccagctcctttccgaccgcatccacgccctccaccccgaggggtacctcatcaccccggcctggctttgggaaaagtacggcctgaggcccgaccagtgggccgactaccgggccctgaccggggacgagtccgacaaccttcccggggtcaagggcatcggggagaagacggcgaggaagcttctggaggagtgggggagcctggaagccctcctcaagaacctggaccggctgaagcccgccatccgggagaagatcctggcccacatggacgatctgaagctctcctgggacctggccaaggtgcgcaccgacctgcccctggaggtggacttcgccaaaaggcgggagcccgaccgggagaggcttagggcctttctggagaggcttgagtttggcagcctcctccacgagttcggccttctggaaagccccaaggccctggaggaggccccctggcccccgccggaaggggccttcgtgggctttgtgctttcccgcaaggagcccatgtgggccgatcttctggccctggccgccgccagggggggccgggtccaccgggcccccgagccttataaagccctcagggacctgaaggaggcgcgggggcttctcgccaaagacctgagcgttctggccctgagggaaggccttggcctcccgcccggcgacgaccccatgctcctcgcctacctcctggacccttccaacaccacccccgagggggtggcccggcgctacggcggggagtggacggaggaggcgggggagcgggccgccctttccgagaggctcttcgccaacctgtgggggaggcttgagggggaggagaggctcctttggctttaccgggaggtggagaggcccctttccgctgtcctggcccacatggaggccacgggggtgcgcctggacgtggcctatctcagggccttgtccctggaggtggccgaggagatcgcccgcctcgaggccgaggtcttccgcctggccggccaccccttcaacctcaactcccgggaccagctggaaagggtcctctttgacgagctagggcttcccgccatcggcaagacggagaagaccggcaagcgctccaccagcgccgccgtcctggaggccctccgcgaggcccaccccatcgtggagaagatcctgcagtaccgggagctcaccaagctgaagagcacctacattgaccccttgccggacctcatccaccccaggacgggccgcctccacacccgcttcaaccagacggccacggccacgggcaggctaagtagctccgatcccaacctccagaacatccccgtccgcaccccgcttgggcagaggatccgccgggccttcatcgccgaggaggggtggctattggtggccctggactatagccagatagagctcagggtgctggcccacctctccggcgacgagaacctgatccgggtcttccaggaggggcgggacatccacacggagaccgccagctggatgttcggcgtcccccgggaggccgtggaccccctgatgcgccgggcggccaagaccatcaacttcggggtcctctacggcatgtcggcccaccgcctctcccaggagctagccatcccttacgaggaggcccaggccttcattgagcgctactttcagagcttccccaaggtgcgggcctggattgagaagaccctggaggagggcaggaggcgggggtacgtggagaccctcttcggccgccgccgctacgtgccagacctagagaatcgggtgaagagcgtgcgggaggcggccgagcgcatggccttcaacatgcccgtccagggcaccgccgccgacctcatgaagctggctatggtgaagctcttccccaggctggaggaaatgggggccaggatgctccttcaggtccacgacgagctggtcctcgaggccccaaaagagagggcggaggccgtggcccggctggccaaggaggtcatggagggggtgtatcccctggccgtgcccctggaggtggaggtggggataggggaggactggctctccgccaaggagtgataccaccccatgctggcccaagccagcatgggggccccggcaaaaggtttctggggaagttaccaggcatggtgggccgaaggaaacaggaaacaagggtatgagggttttttgccctaaagaaaggccagggggtcctcccgaaggaaggcttccagggggataccccctgggcccaggagtagcccctttcctccaaaggcctgggtgaaggcttttagccctttggtcctttgggaaggggcgcttttgacctccaaagccagaaggcgccttcccttcttcaagacgaagtcaacctcctggtccctttcccgccagtagtacacctcaaagcccccgtgggggccgtgggccagaaggtgggcgcccacggcggtttccacgagccgccccatgagggcggcgtccgcccacacctcctttggggaaagccccaagaccgccgtgatgagccccgtattaagggccaggagcttggggctcgaggcgcggcgccggaagggctcggcggcgtacttctgcag

SEQ ID NO: 3335 - DNA, 3026 bp, Artificial Sequence
  Description of Artificial Sequence: Synthetic DNA sequence of Thermus aquaticus DNA Polymerase A735V
atgagggggatgctgcccctctttgagcccaagggccgggtcctcctggtggacggccaccacctggcctaccgcaccttccacgccctgaagggcctcaccaccagccggggggagccggtgcaggcggtctacggcttcgccaagagcctcctcaaggccctcaaggaggacggggacgcggtgatcgtggtctttgacgccaaggccccctccttccgccacgaggcctacggggggtacaaggcgggccgggcccccacgccggaggactttccccggcaactcgccctcatcaaggagctggtggacctcctggggctggcgcgcctcgaggtcccgggctacgaggcggacgacgtcctggccagcctggccaagaaggcggaaaaggagggctacgaggtccgcatcctcaccgccgacaaagacctttaccagctcctttccgaccgcatccacgccctccaccccgaggggtacctcatcaccccggcctggctttgggaaaagtacggcctgaggcccgaccagtgggccgactaccgggccctgaccggggacgagtccgacaaccttcccggggtcaagggcatcggggagaagacggcgaggaagcttctggaggagtgggggagcctggaagccctcctcaagaacctggaccggctgaagcccgccatccgggagaagatcctggcccacatggacgatctgaagctctcctgggacctggccaaggtgcgcaccgacctgcccctggaggtggacttcgccaaaaggcgggagcccgaccgggagaggcttagggcctttctggagaggcttgagtttggcagcctcctccacgagttcggccttctggaaagccccaaggccctggaggaggccccctggcccccgccggaaggggccttcgtgggctttgtgctttcccgcaaggagcccatgtgggccgatcttctggccctggccgccgccagggggggccgggtccaccgggcccccgagccttataaagccctcagggacctgaaggaggcgcgggggcttctcgccaaagacctgagcgttctggccctgagggaaggccttggcctcccgcccggcgacgaccccatgctcctcgcctacctcctggacccttccaacaccacccccgagggggtggcccggcgctacggcggggagtggacggaggaggcgggggagcgggccgccctttccgagaggctcttcgccaacctgtgggggaggcttgagggggaggagaggctcctttggctttaccgggaggtggagaggcccctttccgctgtcctggcccacatggaggccacgggggtgcgcctggacgtggcctatctcagggccttgtccctggaggtggccgaggagatcgcccgcctcgaggccgaggtcttccgcctggccggccaccccttcaacctcaactcccgggaccagctggaaagggtcctctttgacgagctagggcttcccgccatcggcaagacggagaagaccggcaagcgctccaccagcgccgccgtcctggaggccctccgcgaggcccaccccatcgtggagaagatcctgcagtaccgggagctcaccaagctgaagagcacctacattgaccccttgccggacctcatccaccccaggacgggccgcctccacacccgcttcaaccagacggccacggccacgggcaggctaagtagctccgatcccaacctccagaacatccccgtccgcaccccgcttgggcagaggatccgccgggccttcatcgccgaggaggggtggctattggtggccctggactatagccagatagagctcagggtgctggcccacctctccggcgacgagaacctgatccgggtcttccaggaggggcgggacatccacacggagaccgccagctggatgttcggcgtcccccgggaggccgtggaccccctgatgcgccgggcggccaagaccatcaacttcggggtcctctacggcatgtcggcccaccgcctctcccaggagctagccatcccttacgaggaggcccaggccttcattgagcgctactttcagagcttccccaaggtgcgggcctggattgagaagaccctggaggagggcaggaggcgggggtacgtggagaccctcttcggccgccgccgctacgtgccagacctagaggtccgggtgaagagcgtgcgggaggcggccgagcgcatggccttcaacatgcccgtccagggcaccgccgccgacctcatgaagctggctatggtgaagctcttccccaggctggaggaaatgggggccaggatgctccttcaggtccacgacgagctggtcctcgaggccccaaaagagagggcggaggccgtggcccggctggccaaggaggtcatggagggggtgtatcccctggccgtgcccctggaggtggaggtggggataggggaggactggctctccgccaaggagtgataccaccccatgctggcccaagccagcatgggggccccggcaaaaggtttctggggaagttaccaggcatggtgggccgaaggaaacaggaaacaagggtatgagggttttttgccctaaagaaaggccagggggtcctcccgaaggaaggcttccagggggataccccctgggcccaggagtagcccctttcctccaaaggcctgggtgaaggcttttagccctttggtcctttgggaaggggcgcttttgacctccaaagccagaaggcgccttcccttcttcaagacgaagtcaacctcctggtccctttcccgccagtagtacacctcaaagcccccgtgggggccgtgggccagaaggtgggcgcccacggcggtttccacgagccgccccatgagggcggcgtccgcccacacctcctttggggaaagccccaagaccgccgtgatgagccccgtattaagggccaggagcttggggctcgaggcgcggcgccggaagggctcggcggcgtacttctgcag

SEQ ID NO: 3336 - DNA, 3026 bp, Artificial Sequence
  Description of Artificial Sequence: Synthetic DNA sequence of Thermus aquaticus DNA Polymerase E537A
atgagggggatgctgcccctctttgagcccaagggccgggtcctcctggtggacggccaccacctggcctaccgcaccttccacgccctgaagggcctcaccaccagccggggggagccggtgcaggcggtctacggcttcgccaagagcctcctcaaggccctcaaggaggacggggacgcggtgatcgtggtctttgacgccaaggccccctccttccgccacgaggcctacggggggtacaaggcgggccgggcccccacgccggaggactttccccggcaactcgccctcatcaaggagctggtggacctcctggggctggcgcgcctcgaggtcccgggctacgaggcggacgacgtcctggccagcctggccaagaaggcggaaaaggagggctacgaggtccgcatcctcaccgccgacaaagacctttaccagctcctttccgaccgcatccacgccctccaccccgaggggtacctcatcaccccggcctggctttgggaaaagtacggcctgaggcccgaccagtgggccgactaccgggccctgaccggggacgagtccgacaaccttcccggggtcaagggcatcggggagaagacggcgaggaagcttctggaggagtgggggagcctggaagccctcctcaagaacctggaccggctgaagcccgccatccgggagaagatcctggcccacatggacgatctgaagctctcctgggacctggccaaggtgcgcaccgacctgcccctggaggtggacttcgccaaaaggcgggagcccgaccgggagaggcttagggcctttctggagaggcttgagtttggcagcctcctccacgagttcggccttctggaaagccccaaggccctggaggaggccccctggcccccgccggaaggggccttcgtgggctttgtgctttcccgcaaggagcccatgtgggccgatcttctggccctggccgccgccagggggggccgggtccaccgggcccccgagccttataaagccctcagggacctgaaggaggcgcgggggcttctcgccaaagacctgagcgttctggccctgagggaaggccttggcctcccgcccggcgacgaccccatgctcctcgcctacctcctggacccttccaacaccacccccgagggggtggcccggcgctacggcggggagtggacggaggaggcgggggagcgggccgccctttccgagaggctcttcgccaacctgtgggggaggcttgagggggaggagaggctcctttggctttaccgggaggtggagaggcccctttccgctgtcctggcccacatggaggccacgggggtgcgcctggacgtggcctatctcagggccttgtccctggaggtggccgaggagatcgcccgcctcgaggccgaggtcttccgcctggccggccaccccttcaacctcaactcccgggaccagctggaaagggtcctctttgacgagctagggcttcccgccatcggcaagacggagaagaccggcaagcgctccaccagcgccgccgtcctggaggccctccgcgaggcccaccccatcgtggagaagatcctgcagtaccgggctctcaccaagctgaagagcacctacattgaccccttgccggacctcatccaccccaggacgggccgcctccacacccgcttcaaccagacggccacggccacgggcaggctaagtagctccgatcccaacctccagaacatccccgtccgcaccccgcttgggcagaggatccgccgggccttcatcgccgaggaggggtggctattggtggccctggactatagccagatagagctcagggtgctggcccacctctccggcgacgagaacctgatccgggtcttccaggaggggcgggacatccacacggagaccgccagctggatgttcggcgtcccccgggaggccgtggaccccctgatgcgccgggcggccaagaccatcaacttcggggtcctctacggcatgtcggcccaccgcctctcccaggagctagccatcccttacgaggaggcccaggccttcattgagcgctactttcagagcttccccaaggtgcgggcctggattgagaagaccctggaggagggcaggaggcgggggtacgtggagaccctcttcggccgccgccgctacgtgccagacctagaggcccgggtgaagagcgtgcgggaggcggccgagcgcatggccttcaacatgcccgtccagggcaccgccgccgacctcatgaagctggctatggtgaagctcttccccaggctggaggaaatgggggccaggatgctccttcaggtccacgacgagctggtcctcgaggccccaaaagagagggcggaggccgtggcccggctggccaaggaggtcatggagggggtgtatcccctggccgtgcccctggaggtggaggtggggataggggaggactggctctccgccaaggagtgataccaccccatgctggcccaagccagcatgggggccccggcaaaaggtttctggggaagttaccaggcatggtgggccgaaggaaacaggaaacaagggtatgagggttttttgccctaaagaaaggccagggggtcctcccgaaggaaggcttccagggggataccccctgggcccaggagtagcccctttcctccaaaggcctgggtgaaggcttttagccctttggtcctttgggaaggggcgcttttgacctccaaagccagaaggcgccttcccttcttcaagacgaagtcaacctcctggtccctttcccgccagtagtacacctcaaagcccccgtgggggccgtgggccagaaggtgggcgcccacggcggtttccacgagccgccccatgagggcggcgtccgcccacacctcctttggggaaagccccaagaccgccgtgatgagccccgtattaagggccaggagcttggggctcgaggcgcggcgccggaagggctcggcggcgtacttctgcag

SEQ ID NO: 3337 - DNA, 3026 bp, Artificial Sequence
  Description of Artificial Sequence: Synthetic DNA sequence of Thermus aquaticus DNA Polymerase E537R
atgagggggatgctgcccctctttgagcccaagggccgggtcctcctggtggacggccaccacctggcctaccgcaccttccacgccctgaagggcctcaccaccagccggggggagccggtgcaggcggtctacggcttcgccaagagcctcctcaaggccctcaaggaggacggggacgcggtgatcgtggtctttgacgccaaggccccctccttccgccacgaggcctacggggggtacaaggcgggccgggcccccacgccggaggactttccccggcaactcgccctcatcaaggagctggtggacctcctggggctggcgcgcctcgaggtcccgggctacgaggcggacgacgtcctggccagcctggccaagaaggcggaaaaggagggctacgaggtccgcatcctcaccgccgacaaagacctttaccagctcctttccgaccgcatccacgccctccaccccgaggggtacctcatcaccccggcctggctttgggaaaagtacggcctgaggcccgaccagtgggccgactaccgggccctgaccggggacgagtccgacaaccttcccggggtcaagggcatcggggagaagacggcgaggaagcttctggaggagtgggggagcctggaagccctcctcaagaacctggaccggctgaagcccgccatccgggagaagatcctggcccacatggacgatctgaagctctcctgggacctggccaaggtgcgcaccgacctgcccctggaggtggacttcgccaaaaggcgggagcccgaccgggagaggcttagggcctttctggagaggcttgagtttggcagcctcctccacgagttcggccttctggaaagccccaaggccctggaggaggccccctggcccccgccggaaggggccttcgtgggctttgtgctttcccgcaaggagcccatgtgggccgatcttctggccctggccgccgccagggggggccgggtccaccgggcccccgagccttataaagccctcagggacctgaaggaggcgcgggggcttctcgccaaagacctgagcgttctggccctgagggaaggccttggcctcccgcccggcgacgaccccatgctcctcgcctacctcctggacccttccaacaccacccccgagggggtggcccggcgctacggcggggagtggacggaggaggcgggggagcgggccgccctttccgagaggctcttcgccaacctgtgggggaggcttgagggggaggagaggctcctttggctttaccgggaggtggagaggcccctttccgctgtcctggcccacatggaggccacgggggtgcgcctggacgtggcctatctcagggccttgtccctggaggtggccgaggagatcgcccgcctcgaggccgaggtcttccgcctggccggccaccccttcaacctcaactcccgggaccagctggaaagggtcctctttgacgagctagggcttcccgccatcggcaagacggagaagaccggcaagcgctccaccagcgccgccgtcctggaggccctccgcgaggcccaccccatcgtggagaagatcctgcagtaccggcgactcaccaagctgaagagcacctacattgaccccttgccggacctcatccaccccaggacgggccgcctccacacccgcttcaaccagacggccacggccacgggcaggctaagtagctccgatcccaacctccagaacatccccgtccgcaccccgcttgggcagaggatccgccgggccttcatcgccgaggaggggtggctattggtggccctggactatagccagatagagctcagggtgctggcccacctctccggcgacgagaacctgatccgggtcttccaggaggggcgggacatccacacggagaccgccagctggatgttcggcgtcccccgggaggccgtggaccccctgatgcgccgggcggccaagaccatcaacttcggggtcctctacggcatgtcggcccaccgcctctcccaggagctagccatcccttacgaggaggcccaggccttcattgagcgctactttcagagcttccccaaggtgcgggcctggattgagaagaccctggaggagggcaggaggcgggggtacgtggagaccctcttcggccgccgccgctacgtgccagacctagaggcccgggtgaagagcgtgcgggaggcggccgagcgcatggccttcaacatgcccgtccagggcaccgccgccgacctcatgaagctggctatggtgaagctcttccccaggctggaggaaatgggggccaggatgctccttcaggtccacgacgagctggtcctcgaggccccaaaagagagggcggaggccgtggcccggctggccaaggaggtcatggagggggtgtatcccctggccgtgcccctggaggtggaggtggggataggggaggactggctctccgccaaggagtgataccaccccatgctggcccaagccagcatgggggccccggcaaaaggtttctggggaagttaccaggcatggtgggccgaaggaaacaggaaacaagggtatgagggttttttgccctaaagaaaggccagggggtcctcccgaaggaaggcttccagggggataccccctgggcccaggagtagcccctttcctccaaaggcctgggtgaaggcttttagccctttggtcctttgggaaggggcgcttttgacctccaaagccagaaggcgccttcccttcttcaagacgaagtcaacctcctggtccctttcccgccagtagtacacctcaaagcccccgtgggggccgtgggccagaaggtgggcgcccacggcggtttccacgagccgccccatgagggcggcgtccgcccacacctcctttggggaaagccccaagaccgccgtgatgagccccgtattaagggccaggagcttggggctcgaggcgcggcgccggaagggctcggcggcgtacttctgcag

SEQ ID NO: 3338 - DNA, 3026 bp, Artificial Sequence
  Description of Artificial Sequence: Synthetic DNA sequence of Thermus aquaticus DNA Polymerase E537C
atgagggggatgctgcccctctttgagcccaagggccgggtcctcctggtggacggccaccacctggcctaccgcaccttccacgccctgaagggcctcaccaccagccggggggagccggtgcaggcggtctacggcttcgccaagagcctcctcaaggccctcaaggaggacggggacgcggtgatcgtggtctttgacgccaaggccccctccttccgccacgaggcctacggggggtacaaggcgggccgggcccccacgccggaggactttccccggcaactcgccctcatcaaggagctggtggacctcctggggctggcgcgcctcgaggtcccgggctacgaggcggacgacgtcctggccagcctggccaagaaggcggaaaaggagggctacgaggtccgcatcctcaccgccgacaaagacctttaccagctcctttccgaccgcatccacgccctccaccccgaggggtacctcatcaccccggcctggctttgggaaaagtacggcctgaggcccgaccagtgggccgactaccgggccctgaccggggacgagtccgacaaccttcccggggtcaagggcatcggggagaagacggcgaggaagcttctggaggagtgggggagcctggaagccctcctcaagaacctggaccggctgaagcccgccatccgggagaagatcctggcccacatggacgatctgaagctctcctgggacctggccaaggtgcgcaccgacctgcccctggaggtggacttcgccaaaaggcgggagcccgaccgggagaggcttagggcctttctggagaggcttgagtttggcagcctcctccacgagttcggccttctggaaagccccaaggccctggaggaggccccctggcccccgccggaaggggccttcgtgggctttgtgctttcccgcaaggagcccatgtgggccgatcttctggccctggccgccgccagggggggccgggtccaccgggcccccgagccttataaagccctcagggacctgaaggaggcgcgggggcttctcgccaaagacctgagcgttctggccctgagggaaggccttggcctcccgcccggcgacgaccccatgctcctcgcctacctcctggacccttccaacaccacccccgagggggtggcccggcgctacggcggggagtggacggaggaggcgggggagcgggccgccctttccgagaggctcttcgccaacctgtgggggaggcttgagggggaggagaggctcctttggctttaccgggaggtggagaggcccctttccgctgtcctggcccacatggaggccacgggggtgcgcctggacgtggcctatctcagggccttgtccctggaggtggccgaggagatcgcccgcctcgaggccgaggtcttccgcctggccggccaccccttcaacctcaactcccgggaccagctggaaagggtcctctttgacgagctagggcttcccgccatcggcaagacggagaagaccggcaagcgctccaccagcgccgccgtcctggaggccctccgcgaggcccaccccatcgtggagaagatcctgcagtaccggtgtctcaccaagctgaagagcacctacattgaccccttgccggacctcatccaccccaggacgggccgcctccacacccgcttcaaccagacggccacggccacgggcaggctaagtagctccgatcccaacctccagaacatccccgtccgcaccccgcttgggcagaggatccgccgggccttcatcgccgaggaggggtggctattggtggccctggactatagccagatagagctcagggtgctggcccacctctccggcgacgagaacctgatccgggtcttccaggaggggcgggacatccacacggagaccgccagctggatgttcggcgtcccccgggaggccgtggaccccctgatgcgccgggcggccaagaccatcaacttcggggtcctctacggcatgtcggcccaccgcctctcccaggagctagccatcccttacgaggaggcccaggccttcattgagcgctactttcagagcttccccaaggtgcgggcctggattgagaagaccctggaggagggcaggaggcgggggtacgtggagaccctcttcggccgccgccgctacgtgccagacctagaggcccgggtgaagagcgtgcgggaggcggccgagcgcatggccttcaacatgcccgtccagggcaccgccgccgacctcatgaagctggctatggtgaagctcttccccaggctggaggaaatgggggccaggatgctccttcaggtccacgacgagctggtcctcgaggccccaaaagagagggcggaggccgtggcccggctggccaaggaggtcatggagggggtgtatcccctggccgtgcccctggaggtggaggtggggataggggaggactggctctccgccaaggagtgataccaccccatgctggcccaagccagcatgggggccccggcaaaaggtttctggggaagttaccaggcatggtgggccgaaggaaacaggaaacaagggtatgagggttttttgccctaaagaaaggccagggggtcctcccgaaggaaggcttccagggggataccccctgggcccaggagtagcccctttcctccaaaggcctgggtgaaggcttttagccctttggtcctttgggaaggggcgcttttgacctccaaagccagaaggcgccttcccttcttcaagacgaagtcaacctcctggtccctttcccgccagtagtacacctcaaagcccccgtgggggccgtgggccagaaggtgggcgcccacggcggtttccacgagccgccccatgagggcggcgtccgcccacacctcctttggggaaagccccaagaccgccgtgatgagccccgtattaagggccaggagcttggggctcgaggcgcggcgccggaagggctcggcggcgtacttctgcag

SEQ ID NO: 3339 - DNA, 3026 bp, Artificial Sequence
  Description of Artificial Sequence: Synthetic DNA sequence of Thermus aquaticus DNA Polymerase E537G
atgagggggatgctgcccctctttgagcccaagggccgggtcctcctggtggacggccaccacctggcctaccgcaccttccacgccctgaagggcctcaccaccagccggggggagccggtgcaggcggtctacggcttcgccaagagcctcctcaaggccctcaaggaggacggggacgcggtgatcgtggtctttgacgccaaggccccctccttccgccacgaggcctacggggggtacaaggcgggccgggcccccacgccggaggactttccccggcaactcgccctcatcaaggagctggtggacctcctggggctggcgcgcctcgaggtcccgggctacgaggcggacgacgtcctggccagcctggccaagaaggcggaaaaggagggctacgaggtccgcatcctcaccgccgacaaagacctttaccagctcctttccgaccgcatccacgccctccaccccgaggggtacctcatcaccccggcctggctttgggaaaagtacggcctgaggcccgaccagtgggccgactaccgggccctgaccggggacgagtccgacaaccttcccggggtcaagggcatcggggagaagacggcgaggaagcttctggaggagtgggggagcctggaagccctcctcaagaacctggaccggctgaagcccgccatccgggagaagatcctggcccacatggacgatctgaagctctcctgggacctggccaaggtgcgcaccgacctgcccctggaggtggacttcgccaaaaggcgggagcccgaccgggagaggcttagggcctttctggagaggcttgagtttggcagcctcctccacgagttcggccttctggaaagccccaaggccctggaggaggccccctggcccccgccggaaggggccttcgtgggctttgtgctttcccgcaaggagcccatgtgggccgatcttctggccctggccgccgccagggggggccgggtccaccgggcccccgagccttataaagccctcagggacctgaaggaggcgcgggggcttctcgccaaagacctgagcgttctggccctgagggaaggccttggcctcccgcccggcgacgaccccatgctcctcgcctacctcctggacccttccaacaccacccccgagggggtggcccggcgctacggcggggagtggacggaggaggcgggggagcgggccgccctttccgagaggctcttcgccaacctgtgggggaggcttgagggggaggagaggctcctttggctttaccgggaggtggagaggcccctttccgctgtcctggcccacatggaggccacgggggtgcgcctggacgtggcctatctcagggccttgtccctggaggtggccgaggagatcgcccgcctcgaggccgaggtcttccgcctggccggccaccccttcaacctcaactcccgggaccagctggaaagggtcctctttgacgagctagggcttcccgccatcggcaagacggagaagaccggcaagcgctccaccagcgccgccgtcctggaggccctccgcgaggcccaccccatcgtggagaagatcctgcagtaccggggtctcaccaagctgaagagcacctacattgaccccttgccggacctcatccaccccaggacgggccgcctccacacccgcttcaaccagacggccacggccacgggcaggctaagtagctccgatcccaacctccagaacatccccgtccgcaccccgcttgggcagaggatccgccgggccttcatcgccgaggaggggtggctattggtggccctggactatagccagatagagctcagggtgctggcccacctctccggcgacgagaacctgatccgggtcttccaggaggggcgggacatccacacggagaccgccagctggatgttcggcgtcccccgggaggccgtggaccccctgatgcgccgggcggccaagaccatcaacttcggggtcctctacggcatgtcggcccaccgcctctcccaggagctagccatcccttacgaggaggcccaggccttcattgagcgctactttcagagcttccccaaggtgcgggcctggattgagaagaccctggaggagggcaggaggcgggggtacgtggagaccctcttcggccgccgccgctacgtgccagacctagaggcccgggtgaagagcgtgcgggaggcggccgagcgcatggccttcaacatgcccgtccagggcaccgccgccgacctcatgaagctggctatggtgaagctcttccccaggctggaggaaatgggggccaggatgctccttcaggtccacgacgagctggtcctcgaggccccaaaagagagggcggaggccgtggcccggctggccaaggaggtcatggagggggtgtatcccctggccgtgcccctggaggtggaggtggggataggggaggactggctctccgccaaggagtgataccaccccatgctggcccaagccagcatgggggccccggcaaaaggtttctggggaagttaccaggcatggtgggccgaaggaaacaggaaacaagggtatgagggttttttgccctaaagaaaggccagggggtcctcccgaaggaaggcttccagggggataccccctgggcccaggagtagcccctttcctccaaaggcctgggtgaaggcttttagccctttggtcctttgggaaggggcgcttttgacctccaaagccagaaggcgccttcccttcttcaagacgaagtcaacctcctggtccctttcccgccagtagtacacctcaaagcccccgtgggggccgtgggccagaaggtgggcgcccacggcggtttccacgagccgccccatgagggcggcgtccgcccacacctcctttggggaaagccccaagaccgccgtgatgagccccgtattaagggccaggagcttggggctcgaggcgcggcgccggaagggctcggcggcgtacttctgcag

SEQ ID NO: 3340 - DNA, 3026 bp, Artificial Sequence
  Description of Artificial Sequence: Synthetic DNA sequence of Thermus aquaticus DNA Polymerase E537Q
atgagggggatgctgcccctctttgagcccaagggccgggtcctcctggtggacggccaccacctggcctaccgcaccttccacgccctgaagggcctcaccaccagccggggggagccggtgcaggcggtctacggcttcgccaagagcctcctcaaggccctcaaggaggacggggacgcggtgatcgtggtctttgacgccaaggccccctccttccgccacgaggcctacggggggtacaaggcgggccgggcccccacgccggaggactttccccggcaactcgccctcatcaaggagctggtggacctcctggggctggcgcgcctcgaggtcccgggctacgaggcggacgacgtcctggccagcctggccaagaaggcggaaaaggagggctacgaggtccgcatcctcaccgccgacaaagacctttaccagctcctttccgaccgcatccacgccctccaccccgaggggtacctcatcaccccggcctggctttgggaaaagtacggcctgaggcccgaccagtgggccgactaccgggccctgaccggggacgagtccgacaaccttcccggggtcaagggcatcggggagaagacggcgaggaagcttctggaggagtgggggagcctggaagccctcctcaagaacctggaccggctgaagcccgccatccgggagaagatcctggcccacatggacgatctgaagctctcctgggacctggccaaggtgcgcaccgacctgcccctggaggtggacttcgccaaaaggcgggagcccgaccgggagaggcttagggcctttctggagaggcttgagtttggcagcctcctccacgagttcggccttctggaaagccccaaggccctggaggaggccccctggcccccgccggaaggggccttcgtgggctttgtgctttcccgcaaggagcccatgtgggccgatcttctggccctggccgccgccagggggggccgggtccaccgggcccccgagccttataaagccctcagggacctgaaggaggcgcgggggcttctcgccaaagacctgagcgttctggccctgagggaaggccttggcctcccgcccggcgacgaccccatgctcctcgcctacctcctggacccttccaacaccacccccgagggggtggcccggcgctacggcggggagtggacggaggaggcgggggagcgggccgccctttccgagaggctcttcgccaacctgtgggggaggcttgagggggaggagaggctcctttggctttaccgggaggtggagaggcccctttccgctgtcctggcccacatggaggccacgggggtgcgcctggacgtggcctatctcagggccttgtccctggaggtggccgaggagatcgcccgcctcgaggccgaggtcttccgcctggccggccaccccttcaacctcaactcccgggaccagctggaaagggtcctctttgacgagctagggcttcccgccatcggcaagacggagaagaccggcaagcgctccaccagcgccgccgtcctggaggccctccgcgaggcccaccccatcgtggagaagatcctgcagtaccggcaactcaccaagctgaagagcacctacattgaccccttgccggacctcatccaccccaggacgggccgcctccacacccgcttcaaccagacggccacggccacgggcaggctaagtagctccgatcccaacctccagaacatccccgtccgcaccccgcttgggcagaggatccgccgggccttcatcgccgaggaggggtggctattggtggccctggactatagccagatagagctcagggtgctggcccacctctccggcgacgagaacctgatccgggtcttccaggaggggcgggacatccacacggagaccgccagctggatgttcggcgtcccccgggaggccgtggaccccctgatgcgccgggcggccaagaccatcaacttcggggtcctctacggcatgtcggcccaccgcctctcccaggagctagccatcccttacgaggaggcccaggccttcattgagcgctactttcagagcttccccaaggtgcgggcctggattgagaagaccctggaggagggcaggaggcgggggtacgtggagaccctcttcggccgccgccgctacgtgccagacctagaggcccgggtgaagagcgtgcgggaggcggccgagcgcatggccttcaacatgcccgtccagggcaccgccgccgacctcatgaagctggctatggtgaagctcttccccaggctggaggaaatgggggccaggatgctccttcaggtccacgacgagctggtcctcgaggccccaaaagagagggcggaggccgtggcccggctggccaaggaggtcatggagggggtgtatcccctggccgtgcccctggaggtggaggtggggataggggaggactggctctccgccaaggagtgataccaccccatgctggcccaagccagcatgggggccccggcaaaaggtttctggggaagttaccaggcatggtgggccgaaggaaacaggaaacaagggtatgagggttttttgccctaaagaaaggccagggggtcctcccgaaggaaggcttccagggggataccccctgggcccaggagtagcccctttcctccaaaggcctgggtgaaggcttttagccctttggtcctttgggaaggggcgcttttgacctccaaagccagaaggcgccttcccttcttcaagacgaagtcaacctcctggtccctttcccgccagtagtacacctcaaagcccccgtgggggccgtgggccagaaggtgggcgcccacggcggtttccacgagccgccccatgagggcggcgtccgcccacacctcctttggggaaagccccaagaccgccgtgatgagccccgtattaagggccaggagcttggggctcgaggcgcggcgccggaagggctcggcggcgtacttctgcag

SEQ ID NO: 3341 - DNA, 3026 bp, Artificial Sequence
  Description of Artificial Sequence: Synthetic DNA sequence of Thermus aquaticus DNA Polymerase E537H
atgagggggatgctgcccctctttgagcccaagggccgggtcctcctggtggacggccaccacctggcctaccgcaccttccacgccctgaagggcctcaccaccagccggggggagccggtgcaggcggtctacggcttcgccaagagcctcctcaaggccctcaaggaggacggggacgcggtgatcgtggtctttgacgccaaggccccctccttccgccacgaggcctacggggggtacaaggcgggccgggcccccacgccggaggactttccccggcaactcgccctcatcaaggagctggtggacctcctggggctggcgcgcctcgaggtcccgggctacgaggcggacgacgtcctggccagcctggccaagaaggcggaaaaggagggctacgaggtccgcatcctcaccgccgacaaagacctttaccagctcctttccgaccgcatccacgccctccaccccgaggggtacctcatcaccccggcctggctttgggaaaagtacggcctgaggcccgaccagtgggccgactaccgggccctgaccggggacgagtccgacaaccttcccggggtcaagggcatcggggagaagacggcgaggaagcttctggaggagtgggggagcctggaagccctcctcaagaacctggaccggctgaagcccgccatccgggagaagatcctggcccacatggacgatctgaagctctcctgggacctggccaaggtgcgcaccgacctgcccctggaggtggacttcgccaaaaggcgggagcccgaccgggagaggcttagggcctttctggagaggcttgagtttggcagcctcctccacgagttcggccttctggaaagccccaaggccctggaggaggccccctggcccccgccggaaggggccttcgtgggctttgtgctttcccgcaaggagcccatgtgggccgatcttctggccctggccgccgccagggggggccgggtccaccgggcccccgagccttataaagccctcagggacctgaaggaggcgcgggggcttctcgccaaagacctgagcgttctggccctgagggaaggccttggcctcccgcccggcgacgaccccatgctcctcgcctacctcctggacccttccaacaccacccccgagggggtggcccggcgctacggcggggagtggacggaggaggcgggggagcgggccgccctttccgagaggctcttcgccaacctgtgggggaggcttgagggggaggagaggctcctttggctttaccgggaggtggagaggcccctttccgctgtcctggcccacatggaggccacgggggtgcgcctggacgtggcctatctcagggccttgtccctggaggtggccgaggagatcgcccgcctcgaggccgaggtcttccgcctggccggccaccccttcaacctcaactcccgggaccagctggaaagggtcctctttgacgagctagggcttcccgccatcggcaagacggagaagaccggcaagcgctccaccagcgccgccgtcctggaggccctccgcgaggcccaccccatcgtggagaagatcctgcagtaccggcatctcaccaagctgaagagcacctacattgaccccttgccggacctcatccaccccaggacgggccgcctccacacccgcttcaaccagacggccacggccacgggcaggctaagtagctccgatcccaacctccagaacatccccgtccgcaccccgcttgggcagaggatccgccgggccttcatcgccgaggaggggtggctattggtggccctggactatagccagatagagctcagggtgctggcccacctctccggcgacgagaacctgatccgggtcttccaggaggggcgggacatccacacggagaccgccagctggatgttcggcgtcccccgggaggccgtggaccccctgatgcgccgggcggccaagaccatcaacttcggggtcctctacggcatgtcggcccaccgcctctcccaggagctagccatcccttacgaggaggcccaggccttcattgagcgctactttcagagcttccccaaggtgcgggcctggattgagaagaccctggaggagggcaggaggcgggggtacgtggagaccctcttcggccgccgccgctacgtgccagacctagaggcccgggtgaagagcgtgcgggaggcggccgagcgcatggccttcaacatgcccgtccagggcaccgccgccgacctcatgaagctggctatggtgaagctcttccccaggctggaggaaatgggggccaggatgctccttcaggtccacgacgagctggtcctcgaggccccaaaagagagggcggaggccgtggcccggctggccaaggaggtcatggagggggtgtatcccctggccgtgcccctggaggtggaggtggggataggggaggactggctctccgccaaggagtgataccaccccatgctggcccaagccagcatgggggccccggcaaaaggtttctggggaagttaccaggcatggtgggccgaaggaaacaggaaacaagggtatgagggttttttgccctaaagaaaggccagggggtcctcccgaaggaaggcttccagggggataccccctgggcccaggagtagcccctttcctccaaaggcctgggtgaaggcttttagccctttggtcctttgggaaggggcgcttttgacctccaaagccagaaggcgccttcccttcttcaagacgaagtcaacctcctggtccctttcccgccagtagtacacctcaaagcccccgtgggggccgtgggccagaaggtgggcgcccacggcggtttccacgagccgccccatgagggcggcgtccgcccacacctcctttggggaaagccccaagaccgccgtgatgagccccgtattaagggccaggagcttggggctcgaggcgcggcgccggaagggctcggcggcgtacttctgcag

SEQ ID NO: 3342 - DNA, 3026 bp, Artificial Sequence
  Description of Artificial Sequence: Synthetic DNA sequence of Thermus aquaticus DNA Polymerase E537I
atgagggggatgctgcccctctttgagcccaagggccgggtcctcctggtggacggccaccacctggcctaccgcaccttccacgccctgaagggcctcaccaccagccggggggagccggtgcaggcggtctacggcttcgccaagagcctcctcaaggccctcaaggaggacggggacgcggtgatcgtggtctttgacgccaaggccccctccttccgccacgaggcctacggggggtacaaggcgggccgggcccccacgccggaggactttccccggcaactcgccctcatcaaggagctggtggacctcctggggctggcgcgcctcgaggtcccgggctacgaggcggacgacgtcctggccagcctggccaagaaggcggaaaaggagggctacgaggtccgcatcctcaccgccgacaaagacctttaccagctcctttccgaccgcatccacgccctccaccccgaggggtacctcatcaccccggcctggctttgggaaaagtacggcctgaggcccgaccagtgggccgactaccgggccctgaccggggacgagtccgacaaccttcccggggtcaagggcatcggggagaagacggcgaggaagcttctggaggagtgggggagcctggaagccctcctcaagaacctggaccggctgaagcccgccatccgggagaagatcctggcccacatggacgatctgaagctctcctgggacctggccaaggtgcgcaccgacctgcccctggaggtggacttcgccaaaaggcgggagcccgaccgggagaggcttagggcctttctggagaggcttgagtttggcagcctcctccacgagttcggccttctggaaagccccaaggccctggaggaggccccctggcccccgccggaaggggccttcgtgggctttgtgctttcccgcaaggagcccatgtgggccgatcttctggccctggccgccgccagggggggccgggtccaccgggcccccgagccttataaagccctcagggacctgaaggaggcgcgggggcttctcgccaaagacctgagcgttctggccctgagggaaggccttggcctcccgcccggcgacgaccccatgctcctcgcctacctcctggacccttccaacaccacccccgagggggtggcccggcgctacggcggggagtggacggaggaggcgggggagcgggccgccctttccgagaggctcttcgccaacctgtgggggaggcttgagggggaggagaggctcctttggctttaccgggaggtggagaggcccctttccgctgtcctggcccacatggaggccacgggggtgcgcctggacgtggcctatctcagggccttgtccctggaggtggccgaggagatcgcccgcctcgaggccgaggtcttccgcctggccggccaccccttcaacctcaactcccgggaccagctggaaagggtcctctttgacgagctagggcttcccgccatcggcaagacggagaagaccggcaagcgctccaccagcgccgccgtcctggaggccctccgcgaggcccaccccatcgtggagaagatcctgcagtaccggattctcaccaagctgaagagcacctacattgaccccttgccggacctcatccaccccaggacgggccgcctccacacccgcttcaaccagacggccacggccacgggcaggctaagtagctccgatcccaacctccagaacatccccgtccgcaccccgcttgggcagaggatccgccgggccttcatcgccgaggaggggtggctattggtggccctggactatagccagatagagctcagggtgctggcccacctctccggcgacgagaacctgatccgggtcttccaggaggggcgggacatccacacggagaccgccagctggatgttcggcgtcccccgggaggccgtggaccccctgatgcgccgggcggccaagaccatcaacttcggggtcctctacggcatgtcggcccaccgcctctcccaggagctagccatcccttacgaggaggcccaggccttcattgagcgctactttcagagcttccccaaggtgcgggcctggattgagaagaccctggaggagggcaggaggcgggggtacgtggagaccctcttcggccgccgccgctacgtgccagacctagaggcccgggtgaagagcgtgcgggaggcggccgagcgcatggccttcaacatgcccgtccagggcaccgccgccgacctcatgaagctggctatggtgaagctcttccccaggctggaggaaatgggggccaggatgctccttcaggtccacgacgagctggtcctcgaggccccaaaagagagggcggaggccgtggcccggctggccaaggaggtcatggagggggtgtatcccctggccgtgcccctggaggtggaggtggggataggggaggactggctctccgccaaggagtgataccaccccatgctggcccaagccagcatgggggccccggcaaaaggtttctggggaagttaccaggcatggtgggccgaaggaaacaggaaacaagggtatgagggttttttgccctaaagaaaggccagggggtcctcccgaaggaaggcttccagggggataccccctgggcccaggagtagcccctttcctccaaaggcctgggtgaaggcttttagccctttggtcctttgggaaggggcgcttttgacctccaaagccagaaggcgccttcccttcttcaagacgaagtcaacctcctggtccctttcccgccagtagtacacctcaaagcccccgtgggggccgtgggccagaaggtgggcgcccacggcggtttccacgagccgccccatgagggcggcgtccgcccacacctcctttggggaaagccccaagaccgccgtgatgagccccgtattaagggccaggagcttggggctcgaggcgcggcgccggaagggctcggcggcgtacttctgcag

SEQ ID NO: 3343 - DNA, 3026 bp, Artificial Sequence
  Description of Artificial Sequence: Synthetic DNA sequence of Thermus aquaticus DNA Polymerase E537L
atgagggggatgctgcccctctttgagcccaagggccgggtcctcctggtggacggccaccacctggcctaccgcaccttccacgccctgaagggcctcaccaccagccggggggagccggtgcaggcggtctacggcttcgccaagagcctcctcaaggccctcaaggaggacggggacgcggtgatcgtggtctttgacgccaaggccccctccttccgccacgaggcctacggggggtacaaggcgggccgggcccccacgccggaggactttccccggcaactcgccctcatcaaggagctggtggacctcctggggctggcgcgcctcgaggtcccgggctacgaggcggacgacgtcctggccagcctggccaagaaggcggaaaaggagggctacgaggtccgcatcctcaccgccgacaaagacctttaccagctcctttccgaccgcatccacgccctccaccccgaggggtacctcatcaccccggcctggctttgggaaaagtacggcctgaggcccgaccagtgggccgactaccgggccctgaccggggacgagtccgacaaccttcccggggtcaagggcatcggggagaagacggcgaggaagcttctggaggagtgggggagcctggaagccctcctcaagaacctggaccggctgaagcccgccatccgggagaagatcctggcccacatggacgatctgaagctctcctgggacctggccaaggtgcgcaccgacctgcccctggaggtggacttcgccaaaaggcgggagcccgaccgggagaggcttagggcctttctggagaggcttgagtttggcagcctcctccacgagttcggccttctggaaagccccaaggccctggaggaggccccctggcccccgccggaaggggccttcgtgggctttgtgctttcccgcaaggagcccatgtgggccgatcttctggccctggccgccgccagggggggccgggtccaccgggcccccgagccttataaagccctcagggacctgaaggaggcgcgggggcttctcgccaaagacctgagcgttctggccctgagggaaggccttggcctcccgcccggcgacgaccccatgctcctcgcctacctcctggacccttccaacaccacccccgagggggtggcccggcgctacggcggggagtggacggaggaggcgggggagcgggccgccctttccgagaggctcttcgccaacctgtgggggaggcttgagggggaggagaggctcctttggctttaccgggaggtggagaggcccctttccgctgtcctggcccacatggaggccacgggggtgcgcctggacgtggcctatctcagggccttgtccctggaggtggccgaggagatcgcccgcctcgaggccgaggtcttccgcctggccggccaccccttcaacctcaactcccgggaccagctggaaagggtcctctttgacgagctagggcttcccgccatcggcaagacggagaagaccggcaagcgctccaccagcgccgccgtcctggaggccctccgcgaggcccaccccatcgtggagaagatcctgcagtaccggttactcaccaagctgaagagcacctacattgaccccttgccggacctcatccaccccaggacgggccgcctccacacccgcttcaaccagacggccacggccacgggcaggctaagtagctccgatcccaacctccagaacatccccgtccgcaccccgcttgggcagaggatccgccgggccttcatcgccgaggaggggtggctattggtggccctggactatagccagatagagctcagggtgctggcccacctctccggcgacgagaacctgatccgggtcttccaggaggggcgggacatccacacggagaccgccagctggatgttcggcgtcccccgggaggccgtggaccccctgatgcgccgggcggccaagaccatcaacttcggggtcctctacggcatgtcggcccaccgcctctcccaggagctagccatcccttacgaggaggcccaggccttcattgagcgctactttcagagcttccccaaggtgcgggcctggattgagaagaccctggaggagggcaggaggcgggggtacgtggagaccctcttcggccgccgccgctacgtgccagacctagaggcccgggtgaagagcgtgcgggaggcggccgagcgcatggccttcaacatgcccgtccagggcaccgccgccgacctcatgaagctggctatggtgaagctcttccccaggctggaggaaatgggggccaggatgctccttcaggtccacgacgagctggtcctcgaggccccaaaagagagggcggaggccgtggcccggctggccaaggaggtcatggagggggtgtatcccctggccgtgcccctggaggtggaggtggggataggggaggactggctctccgccaaggagtgataccaccccatgctggcccaagccagcatgggggccccggcaaaaggtttctggggaagttaccaggcatggtgggccgaaggaaacaggaaacaagggtatgagggttttttgccctaaagaaaggccagggggtcctcccgaaggaaggcttccagggggataccccctgggcccaggagtagcccctttcctccaaaggcctgggtgaaggcttttagccctttggtcctttgggaaggggcgcttttgacctccaaagccagaaggcgccttcccttcttcaagacgaagtcaacctcctggtccctttcccgccagtagtacacctcaaagcccccgtgggggccgtgggccagaaggtgggcgcccacggcggtttccacgagccgccccatgagggcggcgtccgcccacacctcctttggggaaagccccaagaccgccgtgatgagccccgtattaagggccaggagcttggggctcgaggcgcggcgccggaagggctcggcggcgtacttctgcag

SEQ ID NO: 3344 - DNA, 3026 bp, Artificial Sequence
  Description of Artificial Sequence: Synthetic DNA sequence of Thermus aquaticus DNA Polymerase E537K
atgagggggatgctgcccctctttgagcccaagggccgggtcctcctggtggacggccaccacctggcctaccgcaccttccacgccctgaagggcctcaccaccagccggggggagccggtgcaggcggtctacggcttcgccaagagcctcctcaaggccctcaaggaggacggggacgcggtgatcgtggtctttgacgccaaggccccctccttccgccacgaggcctacggggggtacaaggcgggccgggcccccacgccggaggactttccccggcaactcgccctcatcaaggagctggtggacctcctggggctggcgcgcctcgaggtcccgggctacgaggcggacgacgtcctggccagcctggccaagaaggcggaaaaggagggctacgaggtccgcatcctcaccgccgacaaagacctttaccagctcctttccgaccgcatccacgccctccaccccgaggggtacctcatcaccccggcctggctttgggaaaagtacggcctgaggcccgaccagtgggccgactaccgggccctgaccggggacgagtccgacaaccttcccggggtcaagggcatcggggagaagacggcgaggaagcttctggaggagtgggggagcctggaagccctcctcaagaacctggaccggctgaagcccgccatccgggagaagatcctggcccacatggacgatctgaagctctcctgggacctggccaaggtgcgcaccgacctgcccctggaggtggacttcgccaaaaggcgggagcccgaccgggagaggcttagggcctttctggagaggcttgagtttggcagcctcctccacgagttcggccttctggaaagccccaaggccctggaggaggccccctggcccccgccggaaggggccttcgtgggctttgtgctttcccgcaaggagcccatgtgggccgatcttctggccctggccgccgccagggggggccgggtccaccgggcccccgagccttataaagccctcagggacctgaaggaggcgcgggggcttctcgccaaagacctgagcgttctggccctgagggaaggccttggcctcccgcccggcgacgaccccatgctcctcgcctacctcctggacccttccaacaccacccccgagggggtggcccggcgctacggcggggagtggacggaggaggcgggggagcgggccgccctttccgagaggctcttcgccaacctgtgggggaggcttgagggggaggagaggctcctttggctttaccgggaggtggagaggcccctttccgctgtcctggcccacatggaggccacgggggtgcgcctggacgtggcctatctcagggccttgtccctggaggtggccgaggagatcgcccgcctcgaggccgaggtcttccgcctggccggccaccccttcaacctcaactcccgggaccagctggaaagggtcctctttgacgagctagggcttcccgccatcggcaagacggagaagaccggcaagcgctccaccagcgccgccgtcctggaggccctccgcgaggcccaccccatcgtggagaagatcctgcagtaccggaaactcaccaagctgaagagcacctacattgaccccttgccggacctcatccaccccaggacgggccgcctccacacccgcttcaaccagacggccacggccacgggcaggctaagtagctccgatcccaacctccagaacatccccgtccgcaccccgcttgggcagaggatccgccgggccttcatcgccgaggaggggtggctattggtggccctggactatagccagatagagctcagggtgctggcccacctctccggcgacgagaacctgatccgggtcttccaggaggggcgggacatccacacggagaccgccagctggatgttcggcgtcccccgggaggccgtggaccccctgatgcgccgggcggccaagaccatcaacttcggggtcctctacggcatgtcggcccaccgcctctcccaggagctagccatcccttacgaggaggcccaggccttcattgagcgctactttcagagcttccccaaggtgcgggcctggattgagaagaccctggaggagggcaggaggcgggggtacgtggagaccctcttcggccgccgccgctacgtgccagacctagaggcccgggtgaagagcgtgcgggaggcggccgagcgcatggccttcaacatgcccgtccagggcaccgccgccgacctcatgaagctggctatggtgaagctcttccccaggctggaggaaatgggggccaggatgctccttcaggtccacgacgagctggtcctcgaggccccaaaagagagggcggaggccgtggcccggctggccaaggaggtcatggagggggtgtatcccctggccgtgcccctggaggtggaggtggggataggggaggactggctctccgccaaggagtgataccaccccatgctggcccaagccagcatgggggccccggcaaaaggtttctggggaagttaccaggcatggtgggccgaaggaaacaggaaacaagggtatgagggttttttgccctaaagaaaggccagggggtcctcccgaaggaaggcttccagggggataccccctgggcccaggagtagcccctttcctccaaaggcctgggtgaaggcttttagccctttggtcctttgggaaggggcgcttttgacctccaaagccagaaggcgccttcccttcttcaagacgaagtcaacctcctggtccctttcccgccagtagtacacctcaaagcccccgtgggggccgtgggccagaaggtgggcgcccacggcggtttccacgagccgccccatgagggcggcgtccgcccacacctcctttggggaaagccccaagaccgccgtgatgagccccgtattaagggccaggagcttggggctcgaggcgcggcgccggaagggctcggcggcgtacttctgcag

SEQ ID NO: 3345 - DNA, 3026 bp, Artificial Sequence
  Description of Artificial Sequence: Synthetic DNA sequence of Thermus aquaticus DNA Polymerase E537D
atgagggggatgctgcccctctttgagcccaagggccgggtcctcctggtggacggccaccacctggcctaccgcaccttccacgccctgaagggcctcaccaccagccggggggagccggtgcaggcggtctacggcttcgccaagagcctcctcaaggccctcaaggaggacggggacgcggtgatcgtggtctttgacgccaaggccccctccttccgccacgaggcctacggggggtacaaggcgggccgggcccccacgccggaggactttccccggcaactcgccctcatcaaggagctggtggacctcctggggctggcgcgcctcgaggtcccgggctacgaggcggacgacgtcctggccagcctggccaagaaggcggaaaaggagggctacgaggtccgcatcctcaccgccgacaaagacctttaccagctcctttccgaccgcatccacgccctccaccccgaggggtacctcatcaccccggcctggctttgggaaaagtacggcctgaggcccgaccagtgggccgactaccgggccctgaccggggacgagtccgacaaccttcccggggtcaagggcatcggggagaagacggcgaggaagcttctggaggagtgggggagcctggaagccctcctcaagaacctggaccggctgaagcccgccatccgggagaagatcctggcccacatggacgatctgaagctctcctgggacctggccaaggtgcgcaccgacctgcccctggaggtggacttcgccaaaaggcgggagcccgaccgggagaggcttagggcctttctggagaggcttgagtttggcagcctcctccacgagttcggccttctggaaagccccaaggccctggaggaggccccctggcccccgccggaaggggccttcgtgggctttgtgctttcccgcaaggagcccatgtgggccgatcttctggccctggccgccgccagggggggccgggtccaccgggcccccgagccttataaagccctcagggacctgaaggaggcgcgggggcttctcgccaaagacctgagcgttctggccctgagggaaggccttggcctcccgcccggcgacgaccccatgctcctcgcctacctcctggacccttccaacaccacccccgagggggtggcccggcgctacggcggggagtggacggaggaggcgggggagcgggccgccctttccgagaggctcttcgccaacctgtgggggaggcttgagggggaggagaggctcctttggctttaccgggaggtggagaggcccctttccgctgtcctggcccacatggaggccacgggggtgcgcctggacgtggcctatctcagggccttgtccctggaggtggccgaggagatcgcccgcctcgaggccgaggtcttccgcctggccggccaccccttcaacctcaactcccgggaccagctggaaagggtcctctttgacgagctagggcttcccgccatcggcaagacggagaagaccggcaagcgctccaccagcgccgccgtcctggaggccctccgcgaggcccaccccatcgtggagaagatcctgcagtaccgggatctcaccaagctgaagagcacctacattgaccccttgccggacctcatccaccccaggacgggccgcctccacacccgcttcaaccagacggccacggccacgggcaggctaagtagctccgatcccaacctccagaacatccccgtccgcaccccgcttgggcagaggatccgccgggccttcatcgccgaggaggggtggctattggtggccctggactatagccagatagagctcagggtgctggcccacctctccggcgacgagaacctgatccgggtcttccaggaggggcgggacatccacacggagaccgccagctggatgttcggcgtcccccgggaggccgtggaccccctgatgcgccgggcggccaagaccatcaacttcggggtcctctacggcatgtcggcccaccgcctctcccaggagctagccatcccttacgaggaggcccaggccttcattgagcgctactttcagagcttccccaaggtgcgggcctggattgagaagaccctggaggagggcaggaggcgggggtacgtggagaccctcttcggccgccgccgctacgtgccagacctagaggcccgggtgaagagcgtgcgggaggcggccgagcgcatggccttcaacatgcccgtccagggcaccgccgccgacctcatgaagctggctatggtgaagctcttccccaggctggaggaaatgggggccaggatgctccttcaggtccacgacgagctggtcctcgaggccccaaaagagagggcggaggccgtggcccggctggccaaggaggtcatggagggggtgtatcccctggccgtgcccctggaggtggaggtggggataggggaggactggctctccgccaaggagtgataccaccccatgctggcccaagccagcatgggggccccggcaaaaggtttctggggaagttaccaggcatggtgggccgaaggaaacaggaaacaagggtatgagggttttttgccctaaagaaaggccagggggtcctcccgaaggaaggcttccagggggataccccctgggcccaggagtagcccctttcctccaaaggcctgggtgaaggcttttagccctttggtcctttgggaaggggcgcttttgacctccaaagccagaaggcgccttcccttcttcaagacgaagtcaacctcctggtccctttcccgccagtagtacacctcaaagcccccgtgggggccgtgggccagaaggtgggcgcccacggcggtttccacgagccgccccatgagggcggcgtccgcccacacctcctttggggaaagccccaagaccgccgtgatgagccccgtattaagggccaggagcttggggctcgaggcgcggcgccggaagggctcggcggcgtacttctgcag

SEQ ID NO: 3346 - DNA, 3026 bp, Artificial Sequence
  Description of Artificial Sequence: Synthetic DNA sequence of Thermus aquaticus DNA Polymerase E537F
atgagggggatgctgcccctctttgagcccaagggccgggtcctcctggtggacggccaccacctggcctaccgcaccttccacgccctgaagggcctcaccaccagccggggggagccggtgcaggcggtctacggcttcgccaagagcctcctcaaggccctcaaggaggacggggacgcggtgatcgtggtctttgacgccaaggccccctccttccgccacgaggcctacggggggtacaaggcgggccgggcccccacgccggaggactttccccggcaactcgccctcatcaaggagctggtggacctcctggggctggcgcgcctcgaggtcccgggctacgaggcggacgacgtcctggccagcctggccaagaaggcggaaaaggagggctacgaggtccgcatcctcaccgccgacaaagacctttaccagctcctttccgaccgcatccacgccctccaccccgaggggtacctcatcaccccggcctggctttgggaaaagtacggcctgaggcccgaccagtgggccgactaccgggccctgaccggggacgagtccgacaaccttcccggggtcaagggcatcggggagaagacggcgaggaagcttctggaggagtgggggagcctggaagccctcctcaagaacctggaccggctgaagcccgccatccgggagaagatcctggcccacatggacgatctgaagctctcctgggacctggccaaggtgcgcaccgacctgcccctggaggtggacttcgccaaaaggcgggagcccgaccgggagaggcttagggcctttctggagaggcttgagtttggcagcctcctccacgagttcggccttctggaaagccccaaggccctggaggaggccccctggcccccgccggaaggggccttcgtgggctttgtgctttcccgcaaggagcccatgtgggccgatcttctggccctggccgccgccagggggggccgggtccaccgggcccccgagccttataaagccctcagggacctgaaggaggcgcgggggcttctcgccaaagacctgagcgttctggccctgagggaaggccttggcctcccgcccggcgacgaccccatgctcctcgcctacctcctggacccttccaacaccacccccgagggggtggcccggcgctacggcggggagtggacggaggaggcgggggagcgggccgccctttccgagaggctcttcgccaacctgtgggggaggcttgagggggaggagaggctcctttggctttaccgggaggtggagaggcccctttccgctgtcctggcccacatggaggccacgggggtgcgcctggacgtggcctatctcagggccttgtccctggaggtggccgaggagatcgcccgcctcgaggccgaggtcttccgcctggccggccaccccttcaacctcaactcccgggaccagctggaaagggtcctctttgacgagctagggcttcccgccatcggcaagacggagaagaccggcaagcgctccaccagcgccgccgtcctggaggccctccgcgaggcccaccccatcgtggagaagatcctgcagtaccggtttctcaccaagctgaagagcacctacattgaccccttgccggacctcatccaccccaggacgggccgcctccacacccgcttcaaccagacggccacggccacgggcaggctaagtagctccgatcccaacctccagaacatccccgtccgcaccccgcttgggcagaggatccgccgggccttcatcgccgaggaggggtggctattggtggccctggactatagccagatagagctcagggtgctggcccacctctccggcgacgagaacctgatccgggtcttccaggaggggcgggacatccacacggagaccgccagctggatgttcggcgtcccccgggaggccgtggaccccctgatgcgccgggcggccaagaccatcaacttcggggtcctctacggcatgtcggcccaccgcctctcccaggagctagccatcccttacgaggaggcccaggccttcattgagcgctactttcagagcttccccaaggtgcgggcctggattgagaagaccctggaggagggcaggaggcgggggtacgtggagaccctcttcggccgccgccgctacgtgccagacctagaggcccgggtgaagagcgtgcgggaggcggccgagcgcatggccttcaacatgcccgtccagggcaccgccgccgacctcatgaagctggctatggtgaagctcttccccaggctggaggaaatgggggccaggatgctccttcaggtccacgacgagctggtcctcgaggccccaaaagagagggcggaggccgtggcccggctggccaaggaggtcatggagggggtgtatcccctggccgtgcccctggaggtggaggtggggataggggaggactggctctccgccaaggagtgataccaccccatgctggcccaagccagcatgggggccccggcaaaaggtttctggggaagttaccaggcatggtgggccgaaggaaacaggaaacaagggtatgagggttttttgccctaaagaaaggccagggggtcctcccgaaggaaggcttccagggggataccccctgggcccaggagtagcccctttcctccaaaggcctgggtgaaggcttttagccctttggtcctttgggaaggggcgcttttgacctccaaagccagaaggcgccttcccttcttcaagacgaagtcaacctcctggtccctttcccgccagtagtacacctcaaagcccccgtgggggccgtgggccagaaggtgggcgcccacggcggtttccacgagccgccccatgagggcggcgtccgcccacacctcctttggggaaagccccaagaccgccgtgatgagccccgtattaagggccaggagcttggggctcgaggcgcggcgccggaagggctcggcggcgtacttctgcag

SEQ ID NO: 3347 - DNA, 3026 bp, Artificial Sequence
  Description of Artificial Sequence: Synthetic DNA sequence of Thermus aquaticus DNA Polymerase E537S
atgagggggatgctgcccctctttgagcccaagggccgggtcctcctggtggacggccaccacctggcctaccgcaccttccacgccctgaagggcctcaccaccagccggggggagccggtgcaggcggtctacggcttcgccaagagcctcctcaaggccctcaaggaggacggggacgcggtgatcgtggtctttgacgccaaggccccctccttccgccacgaggcctacggggggtacaaggcgggccgggcccccacgccggaggactttccccggcaactcgccctcatcaaggagctggtggacctcctggggctggcgcgcctcgaggtcccgggctacgaggcggacgacgtcctggccagcctggccaagaaggcggaaaaggagggctacgaggtccgcatcctcaccgccgacaaagacctttaccagctcctttccgaccgcatccacgccctccaccccgaggggtacctcatcaccccggcctggctttgggaaaagtacggcctgaggcccgaccagtgggccgactaccgggccctgaccggggacgagtccgacaaccttcccggggtcaagggcatcggggagaagacggcgaggaagcttctggaggagtgggggagcctggaagccctcctcaagaacctggaccggctgaagcccgccatccgggagaagatcctggcccacatggacgatctgaagctctcctgggacctggccaaggtgcgcaccgacctgcccctggaggtggacttcgccaaaaggcgggagcccgaccgggagaggcttagggcctttctggagaggcttgagtttggcagcctcctccacgagttcggccttctggaaagccccaaggccctggaggaggccccctggcccccgccggaaggggccttcgtgggctttgtgctttcccgcaaggagcccatgtgggccgatcttctggccctggccgccgccagggggggccgggtccaccgggcccccgagccttataaagccctcagggacctgaaggaggcgcgggggcttctcgccaaagacctgagcgttctggccctgagggaaggccttggcctcccgcccggcgacgaccccatgctcctcgcctacctcctggacccttccaacaccacccccgagggggtggcccggcgctacggcggggagtggacggaggaggcgggggagcgggccgccctttccgagaggctcttcgccaacctgtgggggaggcttgagggggaggagaggctcctttggctttaccgggaggtggagaggcccctttccgctgtcctggcccacatggaggccacgggggtgcgcctggacgtggcctatctcagggccttgtccctggaggtggccgaggagatcgcccgcctcgaggccgaggtcttccgcctggccggccaccccttcaacctcaactcccgggaccagctggaaagggtcctctttgacgagctagggcttcccgccatcggcaagacggagaagaccggcaagcgctccaccagcgccgccgtcctggaggccctccgcgaggcccaccccatcgtggagaagatcctgcagtaccggtctctcaccaagctgaagagcacctacattgaccccttgccggacctcatccaccccaggacgggccgcctccacacccgcttcaaccagacggccacggccacgggcaggctaagtagctccgatcccaacctccagaacatccccgtccgcaccccgcttgggcagaggatccgccgggccttcatcgccgaggaggggtggctattggtggccctggactatagccagatagagctcagggtgctggcccacctctccggcgacgagaacctgatccgggtcttccaggaggggcgggacatccacacggagaccgccagctggatgttcggcgtcccccgggaggccgtggaccccctgatgcgccgggcggccaagaccatcaacttcggggtcctctacggcatgtcggcccaccgcctctcccaggagctagccatcccttacgaggaggcccaggccttcattgagcgctactttcagagcttccccaaggtgcgggcctggattgagaagaccctggaggagggcaggaggcgggggtacgtggagaccctcttcggccgccgccgctacgtgccagacctagaggcccgggtgaagagcgtgcgggaggcggccgagcgcatggccttcaacatgcccgtccagggcaccgccgccgacctcatgaagctggctatggtgaagctcttccccaggctggaggaaatgggggccaggatgctccttcaggtccacgacgagctggtcctcgaggccccaaaagagagggcggaggccgtggcccggctggccaaggaggtcatggagggggtgtatcccctggccgtgcccctggaggtggaggtggggataggggaggactggctctccgccaaggagtgataccaccccatgctggcccaagccagcatgggggccccggcaaaaggtttctggggaagttaccaggcatggtgggccgaaggaaacaggaaacaagggtatgagggttttttgccctaaagaaaggccagggggtcctcccgaaggaaggcttccagggggataccccctgggcccaggagtagcccctttcctccaaaggcctgggtgaaggcttttagccctttggtcctttgggaaggggcgcttttgacctccaaagccagaaggcgccttcccttcttcaagacgaagtcaacctcctggtccctttcccgccagtagtacacctcaaagcccccgtgggggccgtgggccagaaggtgggcgcccacggcggtttccacgagccgccccatgagggcggcgtccgcccacacctcctttggggaaagccccaagaccgccgtgatgagccccgtattaagggccaggagcttggggctcgaggcgcggcgccggaagggctcggcggcgtacttctgcag

SEQ ID NO: 3348 - DNA, 3026 bp, Artificial Sequence
  Description of Artificial Sequence: Synthetic DNA sequence of Thermus aquaticus DNA Polymerase E537Y
atgagggggatgctgcccctctttgagcccaagggccgggtcctcctggtggacggccaccacctggcctaccgcaccttccacgccctgaagggcctcaccaccagccggggggagccggtgcaggcggtctacggcttcgccaagagcctcctcaaggccctcaaggaggacggggacgcggtgatcgtggtctttgacgccaaggccccctccttccgccacgaggcctacggggggtacaaggcgggccgggcccccacgccggaggactttccccggcaactcgccctcatcaaggagctggtggacctcctggggctggcgcgcctcgaggtcccgggctacgaggcggacgacgtcctggccagcctggccaagaaggcggaaaaggagggctacgaggtccgcatcctcaccgccgacaaagacctttaccagctcctttccgaccgcatccacgccctccaccccgaggggtacctcatcaccccggcctggctttgggaaaagtacggcctgaggcccgaccagtgggccgactaccgggccctgaccggggacgagtccgacaaccttcccggggtcaagggcatcggggagaagacggcgaggaagcttctggaggagtgggggagcctggaagccctcctcaagaacctggaccggctgaagcccgccatccgggagaagatcctggcccacatggacgatctgaagctctcctgggacctggccaaggtgcgcaccgacctgcccctggaggtggacttcgccaaaaggcgggagcccgaccgggagaggcttagggcctttctggagaggcttgagtttggcagcctcctccacgagttcggccttctggaaagccccaaggccctggaggaggccccctggcccccgccggaaggggccttcgtgggctttgtgctttcccgcaaggagcccatgtgggccgatcttctggccctggccgccgccagggggggccgggtccaccgggcccccgagccttataaagccctcagggacctgaaggaggcgcgggggcttctcgccaaagacctgagcgttctggccctgagggaaggccttggcctcccgcccggcgacgaccccatgctcctcgcctacctcctggacccttccaacaccacccccgagggggtggcccggcgctacggcggggagtggacggaggaggcgggggagcgggccgccctttccgagaggctcttcgccaacctgtgggggaggcttgagggggaggagaggctcctttggctttaccgggaggtggagaggcccctttccgctgtcctggcccacatggaggccacgggggtgcgcctggacgtggcctatctcagggccttgtccctggaggtggccgaggagatcgcccgcctcgaggccgaggtcttccgcctggccggccaccccttcaacctcaactcccgggaccagctggaaagggtcctctttgacgagctagggcttcccgccatcggcaagacggagaagaccggcaagcgctccaccagcgccgccgtcctggaggccctccgcgaggcccaccccatcgtggagaagatcctgcagtaccggtatctcaccaagctgaagagcacctacattgaccccttgccggacctcatccaccccaggacgggccgcctccacacccgcttcaaccagacggccacggccacgggcaggctaagtagctccgatcccaacctccagaacatccccgtccgcaccccgcttgggcagaggatccgccgggccttcatcgccgaggaggggtggctattggtggccctggactatagccagatagagctcagggtgctggcccacctctccggcgacgagaacctgatccgggtcttccaggaggggcgggacatccacacggagaccgccagctggatgttcggcgtcccccgggaggccgtggaccccctgatgcgccgggcggccaagaccatcaacttcggggtcctctacggcatgtcggcccaccgcctctcccaggagctagccatcccttacgaggaggcccaggccttcattgagcgctactttcagagcttccccaaggtgcgggcctggattgagaagaccctggaggagggcaggaggcgggggtacgtggagaccctcttcggccgccgccgctacgtgccagacctagaggcccgggtgaagagcgtgcgggaggcggccgagcgcatggccttcaacatgcccgtccagggcaccgccgccgacctcatgaagctggctatggtgaagctcttccccaggctggaggaaatgggggccaggatgctccttcaggtccacgacgagctggtcctcgaggccccaaaagagagggcggaggccgtggcccggctggccaaggaggtcatggagggggtgtatcccctggccgtgcccctggaggtggaggtggggataggggaggactggctctccgccaaggagtgataccaccccatgctggcccaagccagcatgggggccccggcaaaaggtttctggggaagttaccaggcatggtgggccgaaggaaacaggaaacaagggtatgagggttttttgccctaaagaaaggccagggggtcctcccgaaggaaggcttccagggggataccccctgggcccaggagtagcccctttcctccaaaggcctgggtgaaggcttttagccctttggtcctttgggaaggggcgcttttgacctccaaagccagaaggcgccttcccttcttcaagacgaagtcaacctcctggtccctttcccgccagtagtacacctcaaagcccccgtgggggccgtgggccagaaggtgggcgcccacggcggtttccacgagccgccccatgagggcggcgtccgcccacacctcctttggggaaagccccaagaccgccgtgatgagccccgtattaagggccaggagcttggggctcgaggcgcggcgccggaagggctcggcggcgtacttctgcag

SEQ ID NO: 3349 - DNA, 3026 bp, Artificial Sequence
  Description of Artificial Sequence: Synthetic DNA sequence of Thermus aquaticus DNA Polymerase E537W
atgagggggatgctgcccctctttgagcccaagggccgggtcctcctggtggacggccaccacctggcctaccgcaccttccacgccctgaagggcctcaccaccagccggggggagccggtgcaggcggtctacggcttcgccaagagcctcctcaaggccctcaaggaggacggggacgcggtgatcgtggtctttgacgccaaggccccctccttccgccacgaggcctacggggggtacaaggcgggccgggcccccacgccggaggactttccccggcaactcgccctcatcaaggagctggtggacctcctggggctggcgcgcctcgaggtcccgggctacgaggcggacgacgtcctggccagcctggccaagaaggcggaaaaggagggctacgaggtccgcatcctcaccgccgacaaagacctttaccagctcctttccgaccgcatccacgccctccaccccgaggggtacctcatcaccccggcctggctttgggaaaagtacggcctgaggcccgaccagtgggccgactaccgggccctgaccggggacgagtccgacaaccttcccggggtcaagggcatcggggagaagacggcgaggaagcttctggaggagtgggggagcctggaagccctcctcaagaacctggaccggctgaagcccgccatccgggagaagatcctggcccacatggacgatctgaagctctcctgggacctggccaaggtgcgcaccgacctgcccctggaggtggacttcgccaaaaggcgggagcccgaccgggagaggcttagggcctttctggagaggcttgagtttggcagcctcctccacgagttcggccttctggaaagccccaaggccctggaggaggccccctggcccccgccggaaggggccttcgtgggctttgtgctttcccgcaaggagcccatgtgggccgatcttctggccctggccgccgccagggggggccgggtccaccgggcccccgagccttataaagccctcagggacctgaaggaggcgcgggggcttctcgccaaagacctgagcgttctggccctgagggaaggccttggcctcccgcccggcgacgaccccatgctcctcgcctacctcctggacccttccaacaccacccccgagggggtggcccggcgctacggcggggagtggacggaggaggcgggggagcgggccgccctttccgagaggctcttcgccaacctgtgggggaggcttgagggggaggagaggctcctttggctttaccgggaggtggagaggcccctttccgctgtcctggcccacatggaggccacgggggtgcgcctggacgtggcctatctcagggccttgtccctggaggtggccgaggagatcgcccgcctcgaggccgaggtcttccgcctggccggccaccccttcaacctcaactcccgggaccagctggaaagggtcctctttgacgagctagggcttcccgccatcggcaagacggagaagaccggcaagcgctccaccagcgccgccgtcctggaggccctccgcgaggcccaccccatcgtggagaagatcctgcagtaccggtggctcaccaagctgaagagcacctacattgaccccttgccggacctcatccaccccaggacgggccgcctccacacccgcttcaaccagacggccacggccacgggcaggctaagtagctccgatcccaacctccagaacatccccgtccgcaccccgcttgggcagaggatccgccgggccttcatcgccgaggaggggtggctattggtggccctggactatagccagatagagctcagggtgctggcccacctctccggcgacgagaacctgatccgggtcttccaggaggggcgggacatccacacggagaccgccagctggatgttcggcgtcccccgggaggccgtggaccccctgatgcgccgggcggccaagaccatcaacttcggggtcctctacggcatgtcggcccaccgcctctcccaggagctagccatcccttacgaggaggcccaggccttcattgagcgctactttcagagcttccccaaggtgcgggcctggattgagaagaccctggaggagggcaggaggcgggggtacgtggagaccctcttcggccgccgccgctacgtgccagacctagaggcccgggtgaagagcgtgcgggaggcggccgagcgcatggccttcaacatgcccgtccagggcaccgccgccgacctcatgaagctggctatggtgaagctcttccccaggctggaggaaatgggggccaggatgctccttcaggtccacgacgagctggtcctcgaggccccaaaagagagggcggaggccgtggcccggctggccaaggaggtcatggagggggtgtatcccctggccgtgcccctggaggtggaggtggggataggggaggactggctctccgccaaggagtgataccaccccatgctggcccaagccagcatgggggccccggcaaaaggtttctggggaagttaccaggcatggtgggccgaaggaaacaggaaacaagggtatgagggttttttgccctaaagaaaggccagggggtcctcccgaaggaaggcttccagggggataccccctgggcccaggagtagcccctttcctccaaaggcctgggtgaaggcttttagccctttggtcctttgggaaggggcgcttttgacctccaaagccagaaggcgccttcccttcttcaagacgaagtcaacctcctggtccctttcccgccagtagtacacctcaaagcccccgtgggggccgtgggccagaaggtgggcgcccacggcggtttccacgagccgccccatgagggcggcgtccgcccacacctcctttggggaaagccccaagaccgccgtgatgagccccgtattaagggccaggagcttggggctcgaggcgcggcgccggaagggctcggcggcgtacttctgcag

SEQ ID NO: 3350 - DNA, 3026 bp, Artificial Sequence
  Description of Artificial Sequence: Synthetic DNA sequence of Thermus aquaticus DNA Polymerase E537P
atgagggggatgctgcccctctttgagcccaagggccgggtcctcctggtggacggccaccacctggcctaccgcaccttccacgccctgaagggcctcaccaccagccggggggagccggtgcaggcggtctacggcttcgccaagagcctcctcaaggccctcaaggaggacggggacgcggtgatcgtggtctttgacgccaaggccccctccttccgccacgaggcctacggggggtacaaggcgggccgggcccccacgccggaggactttccccggcaactcgccctcatcaaggagctggtggacctcctggggctggcgcgcctcgaggtcccgggctacgaggcggacgacgtcctggccagcctggccaagaaggcggaaaaggagggctacgaggtccgcatcctcaccgccgacaaagacctttaccagctcctttccgaccgcatccacgccctccaccccgaggggtacctcatcaccccggcctggctttgggaaaagtacggcctgaggcccgaccagtgggccgactaccgggccctgaccggggacgagtccgacaaccttcccggggtcaagggcatcggggagaagacggcgaggaagcttctggaggagtgggggagcctggaagccctcctcaagaacctggaccggctgaagcccgccatccgggagaagatcctggcccacatggacgatctgaagctctcctgggacctggccaaggtgcgcaccgacctgcccctggaggtggacttcgccaaaaggcgggagcccgaccgggagaggcttagggcctttctggagaggcttgagtttggcagcctcctccacgagttcggccttctggaaagccccaaggccctggaggaggccccctggcccccgccggaaggggccttcgtgggctttgtgctttcccgcaaggagcccatgtgggccgatcttctggccctggccgccgccagggggggccgggtccaccgggcccccgagccttataaagccctcagggacctgaaggaggcgcgggggcttctcgccaaagacctgagcgttctggccctgagggaaggccttggcctcccgcccggcgacgaccccatgctcctcgcctacctcctggacccttccaacaccacccccgagggggtggcccggcgctacggcggggagtggacggaggaggcgggggagcgggccgccctttccgagaggctcttcgccaacctgtgggggaggcttgagggggaggagaggctcctttggctttaccgggaggtggagaggcccctttccgctgtcctggcccacatggaggccacgggggtgcgcctggacgtggcctatctcagggccttgtccctggaggtggccgaggagatcgcccgcctcgaggccgaggtcttccgcctggccggccaccccttcaacctcaactcccgggaccagctggaaagggtcctctttgacgagctagggcttcccgccatcggcaagacggagaagaccggcaagcgctccaccagcgccgccgtcctggaggccctccgcgaggcccaccccatcgtggagaagatcctgcagtaccggcctctcaccaagctgaagagcacctacattgaccccttgccggacctcatccaccccaggacgggccgcctccacacccgcttcaaccagacggccacggccacgggcaggctaagtagctccgatcccaacctccagaacatccccgtccgcaccccgcttgggcagaggatccgccgggccttcatcgccgaggaggggtggctattggtggccctggactatagccagatagagctcagggtgctggcccacctctccggcgacgagaacctgatccgggtcttccaggaggggcgggacatccacacggagaccgccagctggatgttcggcgtcccccgggaggccgtggaccccctgatgcgccgggcggccaagaccatcaacttcggggtcctctacggcatgtcggcccaccgcctctcccaggagctagccatcccttacgaggaggcccaggccttcattgagcgctactttcagagcttccccaaggtgcgggcctggattgagaagaccctggaggagggcaggaggcgggggtacgtggagaccctcttcggccgccgccgctacgtgccagacctagaggcccgggtgaagagcgtgcgggaggcggccgagcgcatggccttcaacatgcccgtccagggcaccgccgccgacctcatgaagctggctatggtgaagctcttccccaggctggaggaaatgggggccaggatgctccttcaggtccacgacgagctggtcctcgaggccccaaaagagagggcggaggccgtggcccggctggccaaggaggtcatggagggggtgtatcccctggccgtgcccctggaggtggaggtggggataggggaggactggctctccgccaaggagtgataccaccccatgctggcccaagccagcatgggggccccggcaaaaggtttctggggaagttaccaggcatggtgggccgaaggaaacaggaaacaagggtatgagggttttttgccctaaagaaaggccagggggtcctcccgaaggaaggcttccagggggataccccctgggcccaggagtagcccctttcctccaaaggcctgggtgaaggcttttagccctttggtcctttgggaaggggcgcttttgacctccaaagccagaaggcgccttcccttcttcaagacgaagtcaacctcctggtccctttcccgccagtagtacacctcaaagcccccgtgggggccgtgggccagaaggtgggcgcccacggcggtttccacgagccgccccatgagggcggcgtccgcccacacctcctttggggaaagccccaagaccgccgtgatgagccccgtattaagggccaggagcttggggctcgaggcgcggcgccggaagggctcggcggcgtacttctgcag

SEQ ID NO: 3351 - DNA, 3026 bp, Artificial Sequence
  Description of Artificial Sequence: Synthetic DNA sequence of Thermus aquaticus DNA Polymerase E537M
atgagggggatgctgcccctctttgagcccaagggccgggtcctcctggtggacggccaccacctggcctaccgcaccttccacgccctgaagggcctcaccaccagccggggggagccggtgcaggcggtctacggcttcgccaagagcctcctcaaggccctcaaggaggacggggacgcggtgatcgtggtctttgacgccaaggccccctccttccgccacgaggcctacggggggtacaaggcgggccgggcccccacgccggaggactttccccggcaactcgccctcatcaaggagctggtggacctcctggggctggcgcgcctcgaggtcccgggctacgaggcggacgacgtcctggccagcctggccaagaaggcggaaaaggagggctacgaggtccgcatcctcaccgccgacaaagacctttaccagctcctttccgaccgcatccacgccctccaccccgaggggtacctcatcaccccggcctggctttgggaaaagtacggcctgaggcccgaccagtgggccgactaccgggccctgaccggggacgagtccgacaaccttcccggggtcaagggcatcggggagaagacggcgaggaagcttctggaggagtgggggagcctggaagccctcctcaagaacctggaccggctgaagcccgccatccgggagaagatcctggcccacatggacgatctgaagctctcctgggacctggccaaggtgcgcaccgacctgcccctggaggtggacttcgccaaaaggcgggagcccgaccgggagaggcttagggcctttctggagaggcttgagtttggcagcctcctccacgagttcggccttctggaaagccccaaggccctggaggaggccccctggcccccgccggaaggggccttcgtgggctttgtgctttcccgcaaggagcccatgtgggccgatcttctggccctggccgccgccagggggggccgggtccaccgggcccccgagccttataaagccctcagggacctgaaggaggcgcgggggcttctcgccaaagacctgagcgttctggccctgagggaaggccttggcctcccgcccggcgacgaccccatgctcctcgcctacctcctggacccttccaacaccacccccgagggggtggcccggcgctacggcggggagtggacggaggaggcgggggagcgggccgccctttccgagaggctcttcgccaacctgtgggggaggcttgagggggaggagaggctcctttggctttaccgggaggtggagaggcccctttccgctgtcctggcccacatggaggccacgggggtgcgcctggacgtggcctatctcagggccttgtccctggaggtggccgaggagatcgcccgcctcgaggccgaggtcttccgcctggccggccaccccttcaacctcaactcccgggaccagctggaaagggtcctctttgacgagctagggcttcccgccatcggcaagacggagaagaccggcaagcgctccaccagcgccgccgtcctggaggccctccgcgaggcccaccccatcgtggagaagatcctgcagtaccggatgctcaccaagctgaagagcacctacattgaccccttgccggacctcatccaccccaggacgggccgcctccacacccgcttcaaccagacggccacggccacgggcaggctaagtagctccgatcccaacctccagaacatccccgtccgcaccccgcttgggcagaggatccgccgggccttcatcgccgaggaggggtggctattggtggccctggactatagccagatagagctcagggtgctggcccacctctccggcgacgagaacctgatccgggtcttccaggaggggcgggacatccacacggagaccgccagctggatgttcggcgtcccccgggaggccgtggaccccctgatgcgccgggcggccaagaccatcaacttcggggtcctctacggcatgtcggcccaccgcctctcccaggagctagccatcccttacgaggaggcccaggccttcattgagcgctactttcagagcttccccaaggtgcgggcctggattgagaagaccctggaggagggcaggaggcgggggtacgtggagaccctcttcggccgccgccgctacgtgccagacctagaggcccgggtgaagagcgtgcgggaggcggccgagcgcatggccttcaacatgcccgtccagggcaccgccgccgacctcatgaagctggctatggtgaagctcttccccaggctggaggaaatgggggccaggatgctccttcaggtccacgacgagctggtcctcgaggccccaaaagagagggcggaggccgtggcccggctggccaaggaggtcatggagggggtgtatcccctggccgtgcccctggaggtggaggtggggataggggaggactggctctccgccaaggagtgataccaccccatgctggcccaagccagcatgggggccccggcaaaaggtttctggggaagttaccaggcatggtgggccgaaggaaacaggaaacaagggtatgagggttttttgccctaaagaaaggccagggggtcctcccgaaggaaggcttccagggggataccccctgggcccaggagtagcccctttcctccaaaggcctgggtgaaggcttttagccctttggtcctttgggaaggggcgcttttgacctccaaagccagaaggcgccttcccttcttcaagacgaagtcaacctcctggtccctttcccgccagtagtacacctcaaagcccccgtgggggccgtgggccagaaggtgggcgcccacggcggtttccacgagccgccccatgagggcggcgtccgcccacacctcctttggggaaagccccaagaccgccgtgatgagccccgtattaagggccaggagcttggggctcgaggcgcggcgccggaagggctcggcggcgtacttctgcag

SEQ ID NO: 3352 - DNA, 3026 bp, Artificial Sequence
  Description of Artificial Sequence: Synthetic DNA sequence of Thermus aquaticus DNA Polymerase E537T
atgagggggatgctgcccctctttgagcccaagggccgggtcctcctggtggacggccaccacctggcctaccgcaccttccacgccctgaagggcctcaccaccagccggggggagccggtgcaggcggtctacggcttcgccaagagcctcctcaaggccctcaaggaggacggggacgcggtgatcgtggtctttgacgccaaggccccctccttccgccacgaggcctacggggggtacaaggcgggccgggcccccacgccggaggactttccccggcaactcgccctcatcaaggagctggtggacctcctggggctggcgcgcctcgaggtcccgggctacgaggcggacgacgtcctggccagcctggccaagaaggcggaaaaggagggctacgaggtccgcatcctcaccgccgacaaagacctttaccagctcctttccgaccgcatccacgccctccaccccgaggggtacctcatcaccccggcctggctttgggaaaagtacggcctgaggcccgaccagtgggccgactaccgggccctgaccggggacgagtccgacaaccttcccggggtcaagggcatcggggagaagacggcgaggaagcttctggaggagtgggggagcctggaagccctcctcaagaacctggaccggctgaagcccgccatccgggagaagatcctggcccacatggacgatctgaagctctcctgggacctggccaaggtgcgcaccgacctgcccctggaggtggacttcgccaaaaggcgggagcccgaccgggagaggcttagggcctttctggagaggcttgagtttggcagcctcctccacgagttcggccttctggaaagccccaaggccctggaggaggccccctggcccccgccggaaggggccttcgtgggctttgtgctttcccgcaaggagcccatgtgggccgatcttctggccctggccgccgccagggggggccgggtccaccgggcccccgagccttataaagccctcagggacctgaaggaggcgcgggggcttctcgccaaagacctgagcgttctggccctgagggaaggccttggcctcccgcccggcgacgaccccatgctcctcgcctacctcctggacccttccaacaccacccccgagggggtggcccggcgctacggcggggagtggacggaggaggcgggggagcgggccgccctttccgagaggctcttcgccaacctgtgggggaggcttgagggggaggagaggctcctttggctttaccgggaggtggagaggcccctttccgctgtcctggcccacatggaggccacgggggtgcgcctggacgtggcctatctcagggccttgtccctggaggtggccgaggagatcgcccgcctcgaggccgaggtcttccgcctggccggccaccccttcaacctcaactcccgggaccagctggaaagggtcctctttgacgagctagggcttcccgccatcggcaagacggagaagaccggcaagcgctccaccagcgccgccgtcctggaggccctccgcgaggcccaccccatcgtggagaagatcctgcagtaccggactctcaccaagctgaagagcacctacattgaccccttgccggacctcatccaccccaggacgggccgcctccacacccgcttcaaccagacggccacggccacgggcaggctaagtagctccgatcccaacctccagaacatccccgtccgcaccccgcttgggcagaggatccgccgggccttcatcgccgaggaggggtggctattggtggccctggactatagccagatagagctcagggtgctggcccacctctccggcgacgagaacctgatccgggtcttccaggaggggcgggacatccacacggagaccgccagctggatgttcggcgtcccccgggaggccgtggaccccctgatgcgccgggcggccaagaccatcaacttcggggtcctctacggcatgtcggcccaccgcctctcccaggagctagccatcccttacgaggaggcccaggccttcattgagcgctactttcagagcttccccaaggtgcgggcctggattgagaagaccctggaggagggcaggaggcgggggtacgtggagaccctcttcggccgccgccgctacgtgccagacctagaggcccgggtgaagagcgtgcgggaggcggccgagcgcatggccttcaacatgcccgtccagggcaccgccgccgacctcatgaagctggctatggtgaagctcttccccaggctggaggaaatgggggccaggatgctccttcaggtccacgacgagctggtcctcgaggccccaaaagagagggcggaggccgtggcccggctggccaaggaggtcatggagggggtgtatcccctggccgtgcccctggaggtggaggtggggataggggaggactggctctccgccaaggagtgataccaccccatgctggcccaagccagcatgggggccccggcaaaaggtttctggggaagttaccaggcatggtgggccgaaggaaacaggaaacaagggtatgagggttttttgccctaaagaaaggccagggggtcctcccgaaggaaggcttccagggggataccccctgggcccaggagtagcccctttcctccaaaggcctgggtgaaggcttttagccctttggtcctttgggaaggggcgcttttgacctccaaagccagaaggcgccttcccttcttcaagacgaagtcaacctcctggtccctttcccgccagtagtacacctcaaagcccccgtgggggccgtgggccagaaggtgggcgcccacggcggtttccacgagccgccccatgagggcggcgtccgcccacacctcctttggggaaagccccaagaccgccgtgatgagccccgtattaagggccaggagcttggggctcgaggcgcggcgccggaagggctcggcggcgtacttctgcag

SEQ ID NO: 3353 - DNA, 3026 bp, Artificial Sequence
  Description of Artificial Sequence: Synthetic DNA sequence of Thermus aquaticus DNA Polymerase E537N
atgagggggatgctgcccctctttgagcccaagggccgggtcctcctggtggacggccaccacctggcctaccgcaccttccacgccctgaagggcctcaccaccagccggggggagccggtgcaggcggtctacggcttcgccaagagcctcctcaaggccctcaaggaggacggggacgcggtgatcgtggtctttgacgccaaggccccctccttccgccacgaggcctacggggggtacaaggcgggccgggcccccacgccggaggactttccccggcaactcgccctcatcaaggagctggtggacctcctggggctggcgcgcctcgaggtcccgggctacgaggcggacgacgtcctggccagcctggccaagaaggcggaaaaggagggctacgaggtccgcatcctcaccgccgacaaagacctttaccagctcctttccgaccgcatccacgccctccaccccgaggggtacctcatcaccccggcctggctttgggaaaagtacggcctgaggcccgaccagtgggccgactaccgggccctgaccggggacgagtccgacaaccttcccggggtcaagggcatcggggagaagacggcgaggaagcttctggaggagtgggggagcctggaagccctcctcaagaacctggaccggctgaagcccgccatccgggagaagatcctggcccacatggacgatctgaagctctcctgggacctggccaaggtgcgcaccgacctgcccctggaggtggacttcgccaaaaggcgggagcccgaccgggagaggcttagggcctttctggagaggcttgagtttggcagcctcctccacgagttcggccttctggaaagccccaaggccctggaggaggccccctggcccccgccggaaggggccttcgtgggctttgtgctttcccgcaaggagcccatgtgggccgatcttctggccctggccgccgccagggggggccgggtccaccgggcccccgagccttataaagccctcagggacctgaaggaggcgcgggggcttctcgccaaagacctgagcgttctggccctgagggaaggccttggcctcccgcccggcgacgaccccatgctcctcgcctacctcctggacccttccaacaccacccccgagggggtggcccggcgctacggcggggagtggacggaggaggcgggggagcgggccgccctttccgagaggctcttcgccaacctgtgggggaggcttgagggggaggagaggctcctttggctttaccgggaggtggagaggcccctttccgctgtcctggcccacatggaggccacgggggtgcgcctggacgtggcctatctcagggccttgtccctggaggtggccgaggagatcgcccgcctcgaggccgaggtcttccgcctggccggccaccccttcaacctcaactcccgggaccagctggaaagggtcctctttgacgagctagggcttcccgccatcggcaagacggagaagaccggcaagcgctccaccagcgccgccgtcctggaggccctccgcgaggcccaccccatcgtggagaagatcctgcagtaccggaatctcaccaagctgaagagcacctacattgaccccttgccggacctcatccaccccaggacgggccgcctccacacccgcttcaaccagacggccacggccacgggcaggctaagtagctccgatcccaacctccagaacatccccgtccgcaccccgcttgggcagaggatccgccgggccttcatcgccgaggaggggtggctattggtggccctggactatagccagatagagctcagggtgctggcccacctctccggcgacgagaacctgatccgggtcttccaggaggggcgggacatccacacggagaccgccagctggatgttcggcgtcccccgggaggccgtggaccccctgatgcgccgggcggccaagaccatcaacttcggggtcctctacggcatgtcggcccaccgcctctcccaggagctagccatcccttacgaggaggcccaggccttcattgagcgctactttcagagcttccccaaggtgcgggcctggattgagaagaccctggaggagggcaggaggcgggggtacgtggagaccctcttcggccgccgccgctacgtgccagacctagaggcccgggtgaagagcgtgcgggaggcggccgagcgcatggccttcaacatgcccgtccagggcaccgccgccgacctcatgaagctggctatggtgaagctcttccccaggctggaggaaatgggggccaggatgctccttcaggtccacgacgagctggtcctcgaggccccaaaagagagggcggaggccgtggcccggctggccaaggaggtcatggagggggtgtatcccctggccgtgcccctggaggtggaggtggggataggggaggactggctctccgccaaggagtgataccaccccatgctggcccaagccagcatgggggccccggcaaaaggtttctggggaagttaccaggcatggtgggccgaaggaaacaggaaacaagggtatgagggttttttgccctaaagaaaggccagggggtcctcccgaaggaaggcttccagggggataccccctgggcccaggagtagcccctttcctccaaaggcctgggtgaaggcttttagccctttggtcctttgggaaggggcgcttttgacctccaaagccagaaggcgccttcccttcttcaagacgaagtcaacctcctggtccctttcccgccagtagtacacctcaaagcccccgtgggggccgtgggccagaaggtgggcgcccacggcggtttccacgagccgccccatgagggcggcgtccgcccacacctcctttggggaaagccccaagaccgccgtgatgagccccgtattaagggccaggagcttggggctcgaggcgcggcgccggaagggctcggcggcgtacttctgcag

SEQ ID NO: 3354 - DNA, 3026 bp, Artificial Sequence
  Description of Artificial Sequence: Synthetic DNA sequence of Thermus aquaticus DNA Polymerase E537V
atgagggggatgctgcccctctttgagcccaagggccgggtcctcctggtggacggccaccacctggcctaccgcaccttccacgccctgaagggcctcaccaccagccggggggagccggtgcaggcggtctacggcttcgccaagagcctcctcaaggccctcaaggaggacggggacgcggtgatcgtggtctttgacgccaaggccccctccttccgccacgaggcctacggggggtacaaggcgggccgggcccccacgccggaggactttccccggcaactcgccctcatcaaggagctggtggacctcctggggctggcgcgcctcgaggtcccgggctacgaggcggacgacgtcctggccagcctggccaagaaggcggaaaaggagggctacgaggtccgcatcctcaccgccgacaaagacctttaccagctcctttccgaccgcatccacgccctccaccccgaggggtacctcatcaccccggcctggctttgggaaaagtacggcctgaggcccgaccagtgggccgactaccgggccctgaccggggacgagtccgacaaccttcccggggtcaagggcatcggggagaagacggcgaggaagcttctggaggagtgggggagcctggaagccctcctcaagaacctggaccggctgaagcccgccatccgggagaagatcctggcccacatggacgatctgaagctctcctgggacctggccaaggtgcgcaccgacctgcccctggaggtggacttcgccaaaaggcgggagcccgaccgggagaggcttagggcctttctggagaggcttgagtttggcagcctcctccacgagttcggccttctggaaagccccaaggccctggaggaggccccctggcccccgccggaaggggccttcgtgggctttgtgctttcccgcaaggagcccatgtgggccgatcttctggccctggccgccgccagggggggccgggtccaccgggcccccgagccttataaagccctcagggacctgaaggaggcgcgggggcttctcgccaaagacctgagcgttctggccctgagggaaggccttggcctcccgcccggcgacgaccccatgctcctcgcctacctcctggacccttccaacaccacccccgagggggtggcccggcgctacggcggggagtggacggaggaggcgggggagcgggccgccctttccgagaggctcttcgccaacctgtgggggaggcttgagggggaggagaggctcctttggctttaccgggaggtggagaggcccctttccgctgtcctggcccacatggaggccacgggggtgcgcctggacgtggcctatctcagggccttgtccctggaggtggccgaggagatcgcccgcctcgaggccgaggtcttccgcctggccggccaccccttcaacctcaactcccgggaccagctggaaagggtcctctttgacgagctagggcttcccgccatcggcaagacggagaagaccggcaagcgctccaccagcgccgccgtcctggaggccctccgcgaggcccaccccatcgtggagaagatcctgcagtaccgggtcctcaccaagctgaagagcacctacattgaccccttgccggacctcatccaccccaggacgggccgcctccacacccgcttcaaccagacggccacggccacgggcaggctaagtagctccgatcccaacctccagaacatccccgtccgcaccccgcttgggcagaggatccgccgggccttcatcgccgaggaggggtggctattggtggccctggactatagccagatagagctcagggtgctggcccacctctccggcgacgagaacctgatccgggtcttccaggaggggcgggacatccacacggagaccgccagctggatgttcggcgtcccccgggaggccgtggaccccctgatgcgccgggcggccaagaccatcaacttcggggtcctctacggcatgtcggcccaccgcctctcccaggagctagccatcccttacgaggaggcccaggccttcattgagcgctactttcagagcttccccaaggtgcgggcctggattgagaagaccctggaggagggcaggaggcgggggtacgtggagaccctcttcggccgccgccgctacgtgccagacctagaggcccgggtgaagagcgtgcgggaggcggccgagcgcatggccttcaacatgcccgtccagggcaccgccgccgacctcatgaagctggctatggtgaagctcttccccaggctggaggaaatgggggccaggatgctccttcaggtccacgacgagctggtcctcgaggccccaaaagagagggcggaggccgtggcccggctggccaaggaggtcatggagggggtgtatcccctggccgtgcccctggaggtggaggtggggataggggaggactggctctccgccaaggagtgataccaccccatgctggcccaagccagcatgggggccccggcaaaaggtttctggggaagttaccaggcatggtgggccgaaggaaacaggaaacaagggtatgagggttttttgccctaaagaaaggccagggggtcctcccgaaggaaggcttccagggggataccccctgggcccaggagtagcccctttcctccaaaggcctgggtgaaggcttttagccctttggtcctttgggaaggggcgcttttgacctccaaagccagaaggcgccttcccttcttcaagacgaagtcaacctcctggtccctttcccgccagtagtacacctcaaagcccccgtgggggccgtgggccagaaggtgggcgcccacggcggtttccacgagccgccccatgagggcggcgtccgcccacacctcctttggggaaagccccaagaccgccgtgatgagccccgtattaagggccaggagcttggggctcgaggcgcggcgccggaagggctcggcggcgtacttctgcag

SEQ ID NO: 3355 - DNA, 3026 bp, Artificial Sequence
  Description of Artificial Sequence: Synthetic DNA sequence of Thermus aquaticus DNA Polymerase A570R
atgagggggatgctgcccctctttgagcccaagggccgggtcctcctggtggacggccaccacctggcctaccgcaccttccacgccctgaagggcctcaccaccagccggggggagccggtgcaggcggtctacggcttcgccaagagcctcctcaaggccctcaaggaggacggggacgcggtgatcgtggtctttgacgccaaggccccctccttccgccacgaggcctacggggggtacaaggcgggccgggcccccacgccggaggactttccccggcaactcgccctcatcaaggagctggtggacctcctggggctggcgcgcctcgaggtcccgggctacgaggcggacgacgtcctggccagcctggccaagaaggcggaaaaggagggctacgaggtccgcatcctcaccgccgacaaagacctttaccagctcctttccgaccgcatccacgccctccaccccgaggggtacctcatcaccccggcctggctttgggaaaagtacggcctgaggcccgaccagtgggccgactaccgggccctgaccggggacgagtccgacaaccttcccggggtcaagggcatcggggagaagacggcgaggaagcttctggaggagtgggggagcctggaagccctcctcaagaacctggaccggctgaagcccgccatccgggagaagatcctggcccacatggacgatctgaagctctcctgggacctggccaaggtgcgcaccgacctgcccctggaggtggacttcgccaaaaggcgggagcccgaccgggagaggcttagggcctttctggagaggcttgagtttggcagcctcctccacgagttcggccttctggaaagccccaaggccctggaggaggccccctggcccccgccggaaggggccttcgtgggctttgtgctttcccgcaaggagcccatgtgggccgatcttctggccctggccgccgccagggggggccgggtccaccgggcccccgagccttataaagccctcagggacctgaaggaggcgcgggggcttctcgccaaagacctgagcgttctggccctgagggaaggccttggcctcccgcccggcgacgaccccatgctcctcgcctacctcctggacccttccaacaccacccccgagggggtggcccggcgctacggcggggagtggacggaggaggcgggggagcgggccgccctttccgagaggctcttcgccaacctgtgggggaggcttgagggggaggagaggctcctttggctttaccgggaggtggagaggcccctttccgctgtcctggcccacatggaggccacgggggtgcgcctggacgtggcctatctcagggccttgtccctggaggtggccgaggagatcgcccgcctcgaggccgaggtcttccgcctggccggccaccccttcaacctcaactcccgggaccagctggaaagggtcctctttgacgagctagggcttcccgccatcggcaagacggagaagaccggcaagcgctccaccagcgccgccgtcctggaggccctccgcgaggcccaccccatcgtggagaagatcctgcagtaccgggagctcaccaagctgaagagcacctacattgaccccttgccggacctcatccaccccaggacgggccgcctccacacccgcttcaaccagacggccacgcgaacgggcaggctaagtagctccgatcccaacctccagaacatccccgtccgcaccccgcttgggcagaggatccgccgggccttcatcgccgaggaggggtggctattggtggccctggactatagccagatagagctcagggtgctggcccacctctccggcgacgagaacctgatccgggtcttccaggaggggcgggacatccacacggagaccgccagctggatgttcggcgtcccccgggaggccgtggaccccctgatgcgccgggcggccaagaccatcaacttcggggtcctctacggcatgtcggcccaccgcctctcccaggagctagccatcccttacgaggaggcccaggccttcattgagcgctactttcagagcttccccaaggtgcgggcctggattgagaagaccctggaggagggcaggaggcgggggtacgtggagaccctcttcggccgccgccgctacgtgccagacctagaggcccgggtgaagagcgtgcgggaggcggccgagcgcatggccttcaacatgcccgtccagggcaccgccgccgacctcatgaagctggctatggtgaagctcttccccaggctggaggaaatgggggccaggatgctccttcaggtccacgacgagctggtcctcgaggccccaaaagagagggcggaggccgtggcccggctggccaaggaggtcatggagggggtgtatcccctggccgtgcccctggaggtggaggtggggataggggaggactggctctccgccaaggagtgataccaccccatgctggcccaagccagcatgggggccccggcaaaaggtttctggggaagttaccaggcatggtgggccgaaggaaacaggaaacaagggtatgagggttttttgccctaaagaaaggccagggggtcctcccgaaggaaggcttccagggggataccccctgggcccaggagtagcccctttcctccaaaggcctgggtgaaggcttttagccctttggtcctttgggaaggggcgcttttgacctccaaagccagaaggcgccttcccttcttcaagacgaagtcaacctcctggtccctttcccgccagtagtacacctcaaagcccccgtgggggccgtgggccagaaggtgggcgcccacggcggtttccacgagccgccccatgagggcggcgtccgcccacacctcctttggggaaagccccaagaccgccgtgatgagccccgtattaagggccaggagcttggggctcgaggcgcggcgccggaagggctcggcggcgtacttctgcag

SEQ ID NO: 3356 - DNA, 3026 bp, Artificial Sequence
  Description of Artificial Sequence: Synthetic DNA sequence of Thermus aquaticus DNA Polymerase A570C
atgagggggatgctgcccctctttgagcccaagggccgggtcctcctggtggacggccaccacctggcctaccgcaccttccacgccctgaagggcctcaccaccagccggggggagccggtgcaggcggtctacggcttcgccaagagcctcctcaaggccctcaaggaggacggggacgcggtgatcgtggtctttgacgccaaggccccctccttccgccacgaggcctacggggggtacaaggcgggccgggcccccacgccggaggactttccccggcaactcgccctcatcaaggagctggtggacctcctggggctggcgcgcctcgaggtcccgggctacgaggcggacgacgtcctggccagcctggccaagaaggcggaaaaggagggctacgaggtccgcatcctcaccgccgacaaagacctttaccagctcctttccgaccgcatccacgccctccaccccgaggggtacctcatcaccccggcctggctttgggaaaagtacggcctgaggcccgaccagtgggccgactaccgggccctgaccggggacgagtccgacaaccttcccggggtcaagggcatcggggagaagacggcgaggaagcttctggaggagtgggggagcctggaagccctcctcaagaacctggaccggctgaagcccgccatccgggagaagatcctggcccacatggacgatctgaagctctcctgggacctggccaaggtgcgcaccgacctgcccctggaggtggacttcgccaaaaggcgggagcccgaccgggagaggcttagggcctttctggagaggcttgagtttggcagcctcctccacgagttcggccttctggaaagccccaaggccctggaggaggccccctggcccccgccggaaggggccttcgtgggctttgtgctttcccgcaaggagcccatgtgggccgatcttctggccctggccgccgccagggggggccgggtccaccgggcccccgagccttataaagccctcagggacctgaaggaggcgcgggggcttctcgccaaagacctgagcgttctggccctgagggaaggccttggcctcccgcccggcgacgaccccatgctcctcgcctacctcctggacccttccaacaccacccccgagggggtggcccggcgctacggcggggagtggacggaggaggcgggggagcgggccgccctttccgagaggctcttcgccaacctgtgggggaggcttgagggggaggagaggctcctttggctttaccgggaggtggagaggcccctttccgctgtcctggcccacatggaggccacgggggtgcgcctggacgtggcctatctcagggccttgtccctggaggtggccgaggagatcgcccgcctcgaggccgaggtcttccgcctggccggccaccccttcaacctcaactcccgggaccagctggaaagggtcctctttgacgagctagggcttcccgccatcggcaagacggagaagaccggcaagcgctccaccagcgccgccgtcctggaggccctccgcgaggcccaccccatcgtggagaagatcctgcagtaccgggagctcaccaagctgaagagcacctacattgaccccttgccggacctcatccaccccaggacgggccgcctccacacccgcttcaaccagacggccacgtgtacgggcaggctaagtagctccgatcccaacctccagaacatccccgtccgcaccccgcttgggcagaggatccgccgggccttcatcgccgaggaggggtggctattggtggccctggactatagccagatagagctcagggtgctggcccacctctccggcgacgagaacctgatccgggtcttccaggaggggcgggacatccacacggagaccgccagctggatgttcggcgtcccccgggaggccgtggaccccctgatgcgccgggcggccaagaccatcaacttcggggtcctctacggcatgtcggcccaccgcctctcccaggagctagccatcccttacgaggaggcccaggccttcattgagcgctactttcagagcttccccaaggtgcgggcctggattgagaagaccctggaggagggcaggaggcgggggtacgtggagaccctcttcggccgccgccgctacgtgccagacctagaggcccgggtgaagagcgtgcgggaggcggccgagcgcatggccttcaacatgcccgtccagggcaccgccgccgacctcatgaagctggctatggtgaagctcttccccaggctggaggaaatgggggccaggatgctccttcaggtccacgacgagctggtcctcgaggccccaaaagagagggcggaggccgtggcccggctggccaaggaggtcatggagggggtgtatcccctggccgtgcccctggaggtggaggtggggataggggaggactggctctccgccaaggagtgataccaccccatgctggcccaagccagcatgggggccccggcaaaaggtttctggggaagttaccaggcatggtgggccgaaggaaacaggaaacaagggtatgagggttttttgccctaaagaaaggccagggggtcctcccgaaggaaggcttccagggggataccccctgggcccaggagtagcccctttcctccaaaggcctgggtgaaggcttttagccctttggtcctttgggaaggggcgcttttgacctccaaagccagaaggcgccttcccttcttcaagacgaagtcaacctcctggtccctttcccgccagtagtacacctcaaagcccccgtgggggccgtgggccagaaggtgggcgcccacggcggtttccacgagccgccccatgagggcggcgtccgcccacacctcctttggggaaagccccaagaccgccgtgatgagccccgtattaagggccaggagcttggggctcgaggcgcggcgccggaagggctcggcggcgtacttctgcag

SEQ ID NO: 3357 - DNA, 3026 bp, Artificial Sequence
  Description of Artificial Sequence: Synthetic DNA sequence of Thermus aquaticus DNA Polymerase A570G
atgagggggatgctgcccctctttgagcccaagggccgggtcctcctggtggacggccaccacctggcctaccgcaccttccacgccctgaagggcctcaccaccagccggggggagccggtgcaggcggtctacggcttcgccaagagcctcctcaaggccctcaaggaggacggggacgcggtgatcgtggtctttgacgccaaggccccctccttccgccacgaggcctacggggggtacaaggcgggccgggcccccacgccggaggactttccccggcaactcgccctcatcaaggagctggtggacctcctggggctggcgcgcctcgaggtcccgggctacgaggcggacgacgtcctggccagcctggccaagaaggcggaaaaggagggctacgaggtccgcatcctcaccgccgacaaagacctttaccagctcctttccgaccgcatccacgccctccaccccgaggggtacctcatcaccccggcctggctttgggaaaagtacggcctgaggcccgaccagtgggccgactaccgggccctgaccggggacgagtccgacaaccttcccggggtcaagggcatcggggagaagacggcgaggaagcttctggaggagtgggggagcctggaagccctcctcaagaacctggaccggctgaagcccgccatccgggagaagatcctggcccacatggacgatctgaagctctcctgggacctggccaaggtgcgcaccgacctgcccctggaggtggacttcgccaaaaggcgggagcccgaccgggagaggcttagggcctttctggagaggcttgagtttggcagcctcctccacgagttcggccttctggaaagccccaaggccctggaggaggccccctggcccccgccggaaggggccttcgtgggctttgtgctttcccgcaaggagcccatgtgggccgatcttctggccctggccgccgccagggggggccgggtccaccgggcccccgagccttataaagccctcagggacctgaaggaggcgcgggggcttctcgccaaagacctgagcgttctggccctgagggaaggccttggcctcccgcccggcgacgaccccatgctcctcgcctacctcctggacccttccaacaccacccccgagggggtggcccggcgctacggcggggagtggacggaggaggcgggggagcgggccgccctttccgagaggctcttcgccaacctgtgggggaggcttgagggggaggagaggctcctttggctttaccgggaggtggagaggcccctttccgctgtcctggcccacatggaggccacgggggtgcgcctggacgtggcctatctcagggccttgtccctggaggtggccgaggagatcgcccgcctcgaggccgaggtcttccgcctggccggccaccccttcaacctcaactcccgggaccagctggaaagggtcctctttgacgagctagggcttcccgccatcggcaagacggagaagaccggcaagcgctccaccagcgccgccgtcctggaggccctccgcgaggcccaccccatcgtggagaagatcctgcagtaccgggagctcaccaagctgaagagcacctacattgaccccttgccggacctcatccaccccaggacgggccgcctccacacccgcttcaaccagacggccacgggtacgggcaggctaagtagctccgatcccaacctccagaacatccccgtccgcaccccgcttgggcagaggatccgccgggccttcatcgccgaggaggggtggctattggtggccctggactatagccagatagagctcagggtgctggcccacctctccggcgacgagaacctgatccgggtcttccaggaggggcgggacatccacacggagaccgccagctggatgttcggcgtcccccgggaggccgtggaccccctgatgcgccgggcggccaagaccatcaacttcggggtcctctacggcatgtcggcccaccgcctctcccaggagctagccatcccttacgaggaggcccaggccttcattgagcgctactttcagagcttccccaaggtgcgggcctggattgagaagaccctggaggagggcaggaggcgggggtacgtggagaccctcttcggccgccgccgctacgtgccagacctagaggcccgggtgaagagcgtgcgggaggcggccgagcgcatggccttcaacatgcccgtccagggcaccgccgccgacctcatgaagctggctatggtgaagctcttccccaggctggaggaaatgggggccaggatgctccttcaggtccacgacgagctggtcctcgaggccccaaaagagagggcggaggccgtggcccggctggccaaggaggtcatggagggggtgtatcccctggccgtgcccctggaggtggaggtggggataggggaggactggctctccgccaaggagtgataccaccccatgctggcccaagccagcatgggggccccggcaaaaggtttctggggaagttaccaggcatggtgggccgaaggaaacaggaaacaagggtatgagggttttttgccctaaagaaaggccagggggtcctcccgaaggaaggcttccagggggataccccctgggcccaggagtagcccctttcctccaaaggcctgggtgaaggcttttagccctttggtcctttgggaaggggcgcttttgacctccaaagccagaaggcgccttcccttcttcaagacgaagtcaacctcctggtccctttcccgccagtagtacacctcaaagcccccgtgggggccgtgggccagaaggtgggcgcccacggcggtttccacgagccgccccatgagggcggcgtccgcccacacctcctttggggaaagccccaagaccgccgtgatgagccccgtattaagggccaggagcttggggctcgaggcgcggcgccggaagggctcggcggcgtacttctgcag

SEQ ID NO: 3358 - DNA, 3026 bp, Artificial Sequence
  Description of Artificial Sequence: Synthetic DNA sequence of Thermus aquaticus DNA Polymerase A570Q
atgagggggatgctgcccctctttgagcccaagggccgggtcctcctggtggacggccaccacctggcctaccgcaccttccacgccctgaagggcctcaccaccagccggggggagccggtgcaggcggtctacggcttcgccaagagcctcctcaaggccctcaaggaggacggggacgcggtgatcgtggtctttgacgccaaggccccctccttccgccacgaggcctacggggggtacaaggcgggccgggcccccacgccggaggactttccccggcaactcgccctcatcaaggagctggtggacctcctggggctggcgcgcctcgaggtcccgggctacgaggcggacgacgtcctggccagcctggccaagaaggcggaaaaggagggctacgaggtccgcatcctcaccgccgacaaagacctttaccagctcctttccgaccgcatccacgccctccaccccgaggggtacctcatcaccccggcctggctttgggaaaagtacggcctgaggcccgaccagtgggccgactaccgggccctgaccggggacgagtccgacaaccttcccggggtcaagggcatcggggagaagacggcgaggaagcttctggaggagtgggggagcctggaagccctcctcaagaacctggaccggctgaagcccgccatccgggagaagatcctggcccacatggacgatctgaagctctcctgggacctggccaaggtgcgcaccgacctgcccctggaggtggacttcgccaaaaggcgggagcccgaccgggagaggcttagggcctttctggagaggcttgagtttggcagcctcctccacgagttcggccttctggaaagccccaaggccctggaggaggccccctggcccccgccggaaggggccttcgtgggctttgtgctttcccgcaaggagcccatgtgggccgatcttctggccctggccgccgccagggggggccgggtccaccgggcccccgagccttataaagccctcagggacctgaaggaggcgcgggggcttctcgccaaagacctgagcgttctggccctgagggaaggccttggcctcccgcccggcgacgaccccatgctcctcgcctacctcctggacccttccaacaccacccccgagggggtggcccggcgctacggcggggagtggacggaggaggcgggggagcgggccgccctttccgagaggctcttcgccaacctgtgggggaggcttgagggggaggagaggctcctttggctttaccgggaggtggagaggcccctttccgctgtcctggcccacatggaggccacgggggtgcgcctggacgtggcctatctcagggccttgtccctggaggtggccgaggagatcgcccgcctcgaggccgaggtcttccgcctggccggccaccccttcaacctcaactcccgggaccagctggaaagggtcctctttgacgagctagggcttcccgccatcggcaagacggagaagaccggcaagcgctccaccagcgccgccgtcctggaggccctccgcgaggcccaccccatcgtggagaagatcctgcagtaccgggagctcaccaagctgaagagcacctacattgaccccttgccggacctcatccaccccaggacgggccgcctccacacccgcttcaaccagacggccacgcaaacgggcaggctaagtagctccgatcccaacctccagaacatccccgtccgcaccccgcttgggcagaggatccgccgggccttcatcgccgaggaggggtggctattggtggccctggactatagccagatagagctcagggtgctggcccacctctccggcgacgagaacctgatccgggtcttccaggaggggcgggacatccacacggagaccgccagctggatgttcggcgtcccccgggaggccgtggaccccctgatgcgccgggcggccaagaccatcaacttcggggtcctctacggcatgtcggcccaccgcctctcccaggagctagccatcccttacgaggaggcccaggccttcattgagcgctactttcagagcttccccaaggtgcgggcctggattgagaagaccctggaggagggcaggaggcgggggtacgtggagaccctcttcggccgccgccgctacgtgccagacctagaggcccgggtgaagagcgtgcgggaggcggccgagcgcatggccttcaacatgcccgtccagggcaccgccgccgacctcatgaagctggctatggtgaagctcttccccaggctggaggaaatgggggccaggatgctccttcaggtccacgacgagctggtcctcgaggccccaaaagagagggcggaggccgtggcccggctggccaaggaggtcatggagggggtgtatcccctggccgtgcccctggaggtggaggtggggataggggaggactggctctccgccaaggagtgataccaccccatgctggcccaagccagcatgggggccccggcaaaaggtttctggggaagttaccaggcatggtgggccgaaggaaacaggaaacaagggtatgagggttttttgccctaaagaaaggccagggggtcctcccgaaggaaggcttccagggggataccccctgggcccaggagtagcccctttcctccaaaggcctgggtgaaggcttttagccctttggtcctttgggaaggggcgcttttgacctccaaagccagaaggcgccttcccttcttcaagacgaagtcaacctcctggtccctttcccgccagtagtacacctcaaagcccccgtgggggccgtgggccagaaggtgggcgcccacggcggtttccacgagccgccccatgagggcggcgtccgcccacacctcctttggggaaagccccaagaccgccgtgatgagccccgtattaagggccaggagcttggggctcgaggcgcggcgccggaagggctcggcggcgtacttctgcag

SEQ ID NO: 3359 - DNA, 3026 bp, Artificial Sequence
  Description of Artificial Sequence: Synthetic DNA sequence of Thermus aquaticus DNA Polymerase A570H
atgagggggatgctgcccctctttgagcccaagggccgggtcctcctggtggacggccaccacctggcctaccgcaccttccacgccctgaagggcctcaccaccagccggggggagccggtgcaggcggtctacggcttcgccaagagcctcctcaaggccctcaaggaggacggggacgcggtgatcgtggtctttgacgccaaggccccctccttccgccacgaggcctacggggggtacaaggcgggccgggcccccacgccggaggactttccccggcaactcgccctcatcaaggagctggtggacctcctggggctggcgcgcctcgaggtcccgggctacgaggcggacgacgtcctggccagcctggccaagaaggcggaaaaggagggctacgaggtccgcatcctcaccgccgacaaagacctttaccagctcctttccgaccgcatccacgccctccaccccgaggggtacctcatcaccccggcctggctttgggaaaagtacggcctgaggcccgaccagtgggccgactaccgggccctgaccggggacgagtccgacaaccttcccggggtcaagggcatcggggagaagacggcgaggaagcttctggaggagtgggggagcctggaagccctcctcaagaacctggaccggctgaagcccgccatccgggagaagatcctggcccacatggacgatctgaagctctcctgggacctggccaaggtgcgcaccgacctgcccctggaggtggacttcgccaaaaggcgggagcccgaccgggagaggcttagggcctttctggagaggcttgagtttggcagcctcctccacgagttcggccttctggaaagccccaaggccctggaggaggccccctggcccccgccggaaggggccttcgtgggctttgtgctttcccgcaaggagcccatgtgggccgatcttctggccctggccgccgccagggggggccgggtccaccgggcccccgagccttataaagccctcagggacctgaaggaggcgcgggggcttctcgccaaagacctgagcgttctggccctgagggaaggccttggcctcccgcccggcgacgaccccatgctcctcgcctacctcctggacccttccaacaccacccccgagggggtggcccggcgctacggcggggagtggacggaggaggcgggggagcgggccgccctttccgagaggctcttcgccaacctgtgggggaggcttgagggggaggagaggctcctttggctttaccgggaggtggagaggcccctttccgctgtcctggcccacatggaggccacgggggtgcgcctggacgtggcctatctcagggccttgtccctggaggtggccgaggagatcgcccgcctcgaggccgaggtcttccgcctggccggccaccccttcaacctcaactcccgggaccagctggaaagggtcctctttgacgagctagggcttcccgccatcggcaagacggagaagaccggcaagcgctccaccagcgccgccgtcctggaggccctccgcgaggcccaccccatcgtggagaagatcctgcagtaccgggagctcaccaagctgaagagcacctacattgaccccttgccggacctcatccaccccaggacgggccgcctccacacccgcttcaaccagacggccacgcatacgggcaggctaagtagctccgatcccaacctccagaacatccccgtccgcaccccgcttgggcagaggatccgccgggccttcatcgccgaggaggggtggctattggtggccctggactatagccagatagagctcagggtgctggcccacctctccggcgacgagaacctgatccgggtcttccaggaggggcgggacatccacacggagaccgccagctggatgttcggcgtcccccgggaggccgtggaccccctgatgcgccgggcggccaagaccatcaacttcggggtcctctacggcatgtcggcccaccgcctctcccaggagctagccatcccttacgaggaggcccaggccttcattgagcgctactttcagagcttccccaaggtgcgggcctggattgagaagaccctggaggagggcaggaggcgggggtacgtggagaccctcttcggccgccgccgctacgtgccagacctagaggcccgggtgaagagcgtgcgggaggcggccgagcgcatggccttcaacatgcccgtccagggcaccgccgccgacctcatgaagctggctatggtgaagctcttccccaggctggaggaaatgggggccaggatgctccttcaggtccacgacgagctggtcctcgaggccccaaaagagagggcggaggccgtggcccggctggccaaggaggtcatggagggggtgtatcccctggccgtgcccctggaggtggaggtggggataggggaggactggctctccgccaaggagtgataccaccccatgctggcccaagccagcatgggggccccggcaaaaggtttctggggaagttaccaggcatggtgggccgaaggaaacaggaaacaagggtatgagggttttttgccctaaagaaaggccagggggtcctcccgaaggaaggcttccagggggataccccctgggcccaggagtagcccctttcctccaaaggcctgggtgaaggcttttagccctttggtcctttgggaaggggcgcttttgacctccaaagccagaaggcgccttcccttcttcaagacgaagtcaacctcctggtccctttcccgccagtagtacacctcaaagcccccgtgggggccgtgggccagaaggtgggcgcccacggcggtttccacgagccgccccatgagggcggcgtccgcccacacctcctttggggaaagccccaagaccgccgtgatgagccccgtattaagggccaggagcttggggctcgaggcgcggcgccggaagggctcggcggcgtacttctgcag

SEQ ID NO: 3360 - DNA, 3026 bp, Artificial Sequence
  Description of Artificial Sequence: Synthetic DNA sequence of Thermus aquaticus DNA Polymerase A570I
atgagggggatgctgcccctctttgagcccaagggccgggtcctcctggtggacggccaccacctggcctaccgcaccttccacgccctgaagggcctcaccaccagccggggggagccggtgcaggcggtctacggcttcgccaagagcctcctcaaggccctcaaggaggacggggacgcggtgatcgtggtctttgacgccaaggccccctccttccgccacgaggcctacggggggtacaaggcgggccgggcccccacgccggaggactttccccggcaactcgccctcatcaaggagctggtggacctcctggggctggcgcgcctcgaggtcccgggctacgaggcggacgacgtcctggccagcctggccaagaaggcggaaaaggagggctacgaggtccgcatcctcaccgccgacaaagacctttaccagctcctttccgaccgcatccacgccctccaccccgaggggtacctcatcaccccggcctggctttgggaaaagtacggcctgaggcccgaccagtgggccgactaccgggccctgaccggggacgagtccgacaaccttcccggggtcaagggcatcggggagaagacggcgaggaagcttctggaggagtgggggagcctggaagccctcctcaagaacctggaccggctgaagcccgccatccgggagaagatcctggcccacatggacgatctgaagctctcctgggacctggccaaggtgcgcaccgacctgcccctggaggtggacttcgccaaaaggcgggagcccgaccgggagaggcttagggcctttctggagaggcttgagtttggcagcctcctccacgagttcggccttctggaaagccccaaggccctggaggaggccccctggcccccgccggaaggggccttcgtgggctttgtgctttcccgcaaggagcccatgtgggccgatcttctggccctggccgccgccagggggggccgggtccaccgggcccccgagccttataaagccctcagggacctgaaggaggcgcgggggcttctcgccaaagacctgagcgttctggccctgagggaaggccttggcctcccgcccggcgacgaccccatgctcctcgcctacctcctggacccttccaacaccacccccgagggggtggcccggcgctacggcggggagtggacggaggaggcgggggagcgggccgccctttccgagaggctcttcgccaacctgtgggggaggcttgagggggaggagaggctcctttggctttaccgggaggtggagaggcccctttccgctgtcctggcccacatggaggccacgggggtgcgcctggacgtggcctatctcagggccttgtccctggaggtggccgaggagatcgcccgcctcgaggccgaggtcttccgcctggccggccaccccttcaacctcaactcccgggaccagctggaaagggtcctctttgacgagctagggcttcccgccatcggcaagacggagaagaccggcaagcgctccaccagcgccgccgtcctggaggccctccgcgaggcccaccccatcgtggagaagatcctgcagtaccgggagctcaccaagctgaagagcacctacattgaccccttgccggacctcatccaccccaggacgggccgcctccacacccgcttcaaccagacggccacgattacgggcaggctaagtagctccgatcccaacctccagaacatccccgtccgcaccccgcttgggcagaggatccgccgggccttcatcgccgaggaggggtggctattggtggccctggactatagccagatagagctcagggtgctggcccacctctccggcgacgagaacctgatccgggtcttccaggaggggcgggacatccacacggagaccgccagctggatgttcggcgtcccccgggaggccgtggaccccctgatgcgccgggcggccaagaccatcaacttcggggtcctctacggcatgtcggcccaccgcctctcccaggagctagccatcccttacgaggaggcccaggccttcattgagcgctactttcagagcttccccaaggtgcgggcctggattgagaagaccctggaggagggcaggaggcgggggtacgtggagaccctcttcggccgccgccgctacgtgccagacctagaggcccgggtgaagagcgtgcgggaggcggccgagcgcatggccttcaacatgcccgtccagggcaccgccgccgacctcatgaagctggctatggtgaagctcttccccaggctggaggaaatgggggccaggatgctccttcaggtccacgacgagctggtcctcgaggccccaaaagagagggcggaggccgtggcccggctggccaaggaggtcatggagggggtgtatcccctggccgtgcccctggaggtggaggtggggataggggaggactggctctccgccaaggagtgataccaccccatgctggcccaagccagcatgggggccccggcaaaaggtttctggggaagttaccaggcatggtgggccgaaggaaacaggaaacaagggtatgagggttttttgccctaaagaaaggccagggggtcctcccgaaggaaggcttccagggggataccccctgggcccaggagtagcccctttcctccaaaggcctgggtgaaggcttttagccctttggtcctttgggaaggggcgcttttgacctccaaagccagaaggcgccttcccttcttcaagacgaagtcaacctcctggtccctttcccgccagtagtacacctcaaagcccccgtgggggccgtgggccagaaggtgggcgcccacggcggtttccacgagccgccccatgagggcggcgtccgcccacacctcctttggggaaagccccaagaccgccgtgatgagccccgtattaagggccaggagcttggggctcgaggcgcggcgccggaagggctcggcggcgtacttctgcag

SEQ ID NO: 3361 - DNA, 3026 bp, Artificial Sequence
  Description of Artificial Sequence: Synthetic DNA sequence of Thermus aquaticus DNA Polymerase A570L
atgagggggatgctgcccctctttgagcccaagggccgggtcctcctggtggacggccaccacctggcctaccgcaccttccacgccctgaagggcctcaccaccagccggggggagccggtgcaggcggtctacggcttcgccaagagcctcctcaaggccctcaaggaggacggggacgcggtgatcgtggtctttgacgccaaggccccctccttccgccacgaggcctacggggggtacaaggcgggccgggcccccacgccggaggactttccccggcaactcgccctcatcaaggagctggtggacctcctggggctggcgcgcctcgaggtcccgggctacgaggcggacgacgtcctggccagcctggccaagaaggcggaaaaggagggctacgaggtccgcatcctcaccgccgacaaagacctttaccagctcctttccgaccgcatccacgccctccaccccgaggggtacctcatcaccccggcctggctttgggaaaagtacggcctgaggcccgaccagtgggccgactaccgggccctgaccggggacgagtccgacaaccttcccggggtcaagggcatcggggagaagacggcgaggaagcttctggaggagtgggggagcctggaagccctcctcaagaacctggaccggctgaagcccgccatccgggagaagatcctggcccacatggacgatctgaagctctcctgggacctggccaaggtgcgcaccgacctgcccctggaggtggacttcgccaaaaggcgggagcccgaccgggagaggcttagggcctttctggagaggcttgagtttggcagcctcctccacgagttcggccttctggaaagccccaaggccctggaggaggccccctggcccccgccggaaggggccttcgtgggctttgtgctttcccgcaaggagcccatgtgggccgatcttctggccctggccgccgccagggggggccgggtccaccgggcccccgagccttataaagccctcagggacctgaaggaggcgcgggggcttctcgccaaagacctgagcgttctggccctgagggaaggccttggcctcccgcccggcgacgaccccatgctcctcgcctacctcctggacccttccaacaccacccccgagggggtggcccggcgctacggcggggagtggacggaggaggcgggggagcgggccgccctttccgagaggctcttcgccaacctgtgggggaggcttgagggggaggagaggctcctttggctttaccgggaggtggagaggcccctttccgctgtcctggcccacatggaggccacgggggtgcgcctggacgtggcctatctcagggccttgtccctggaggtggccgaggagatcgcccgcctcgaggccgaggtcttccgcctggccggccaccccttcaacctcaactcccgggaccagctggaaagggtcctctttgacgagctagggcttcccgccatcggcaagacggagaagaccggcaagcgctccaccagcgccgccgtcctggaggccctccgcgaggcccaccccatcgtggagaagatcctgcagtaccgggagctcaccaagctgaagagcacctacattgaccccttgccggacctcatccaccccaggacgggccgcctccacacccgcttcaaccagacggccacgttaacgggcaggctaagtagctccgatcccaacctccagaacatccccgtccgcaccccgcttgggcagaggatccgccgggccttcatcgccgaggaggggtggctattggtggccctggactatagccagatagagctcagggtgctggcccacctctccggcgacgagaacctgatccgggtcttccaggaggggcgggacatccacacggagaccgccagctggatgttcggcgtcccccgggaggccgtggaccccctgatgcgccgggcggccaagaccatcaacttcggggtcctctacggcatgtcggcccaccgcctctcccaggagctagccatcccttacgaggaggcccaggccttcattgagcgctactttcagagcttccccaaggtgcgggcctggattgagaagaccctggaggagggcaggaggcgggggtacgtggagaccctcttcggccgccgccgctacgtgccagacctagaggcccgggtgaagagcgtgcgggaggcggccgagcgcatggccttcaacatgcccgtccagggcaccgccgccgacctcatgaagctggctatggtgaagctcttccccaggctggaggaaatgggggccaggatgctccttcaggtccacgacgagctggtcctcgaggccccaaaagagagggcggaggccgtggcccggctggccaaggaggtcatggagggggtgtatcccctggccgtgcccctggaggtggaggtggggataggggaggactggctctccgccaaggagtgataccaccccatgctggcccaagccagcatgggggccccggcaaaaggtttctggggaagttaccaggcatggtgggccgaaggaaacaggaaacaagggtatgagggttttttgccctaaagaaaggccagggggtcctcccgaaggaaggcttccagggggataccccctgggcccaggagtagcccctttcctccaaaggcctgggtgaaggcttttagccctttggtcctttgggaaggggcgcttttgacctccaaagccagaaggcgccttcccttcttcaagacgaagtcaacctcctggtccctttcccgccagtagtacacctcaaagcccccgtgggggccgtgggccagaaggtgggcgcccacggcggtttccacgagccgccccatgagggcggcgtccgcccacacctcctttggggaaagccccaagaccgccgtgatgagccccgtattaagggccaggagcttggggctcgaggcgcggcgccggaagggctcggcggcgtacttctgcag

SEQ ID NO: 3362 - DNA, 3026 bp, Artificial Sequence
  Description of Artificial Sequence: Synthetic DNA sequence of Thermus aquaticus DNA Polymerase A570K
atgagggggatgctgcccctctttgagcccaagggccgggtcctcctggtggacggccaccacctggcctaccgcaccttccacgccctgaagggcctcaccaccagccggggggagccggtgcaggcggtctacggcttcgccaagagcctcctcaaggccctcaaggaggacggggacgcggtgatcgtggtctttgacgccaaggccccctccttccgccacgaggcctacggggggtacaaggcgggccgggcccccacgccggaggactttccccggcaactcgccctcatcaaggagctggtggacctcctggggctggcgcgcctcgaggtcccgggctacgaggcggacgacgtcctggccagcctggccaagaaggcggaaaaggagggctacgaggtccgcatcctcaccgccgacaaagacctttaccagctcctttccgaccgcatccacgccctccaccccgaggggtacctcatcaccccggcctggctttgggaaaagtacggcctgaggcccgaccagtgggccgactaccgggccctgaccggggacgagtccgacaaccttcccggggtcaagggcatcggggagaagacggcgaggaagcttctggaggagtgggggagcctggaagccctcctcaagaacctggaccggctgaagcccgccatccgggagaagatcctggcccacatggacgatctgaagctctcctgggacctggccaaggtgcgcaccgacctgcccctggaggtggacttcgccaaaaggcgggagcccgaccgggagaggcttagggcctttctggagaggcttgagtttggcagcctcctccacgagttcggccttctggaaagccccaaggccctggaggaggccccctggcccccgccggaaggggccttcgtgggctttgtgctttcccgcaaggagcccatgtgggccgatcttctggccctggccgccgccagggggggccgggtccaccgggcccccgagccttataaagccctcagggacctgaaggaggcgcgggggcttctcgccaaagacctgagcgttctggccctgagggaaggccttggcctcccgcccggcgacgaccccatgctcctcgcctacctcctggacccttccaacaccacccccgagggggtggcccggcgctacggcggggagtggacggaggaggcgggggagcgggccgccctttccgagaggctcttcgccaacctgtgggggaggcttgagggggaggagaggctcctttggctttaccgggaggtggagaggcccctttccgctgtcctggcccacatggaggccacgggggtgcgcctggacgtggcctatctcagggccttgtccctggaggtggccgaggagatcgcccgcctcgaggccgaggtcttccgcctggccggccaccccttcaacctcaactcccgggaccagctggaaagggtcctctttgacgagctagggcttcccgccatcggcaagacggagaagaccggcaagcgctccaccagcgccgccgtcctggaggccctccgcgaggcccaccccatcgtggagaagatcctgcagtaccgggagctcaccaagctgaagagcacctacattgaccccttgccggacctcatccaccccaggacgggccgcctccacacccgcttcaaccagacggccacgaaaacgggcaggctaagtagctccgatcccaacctccagaacatccccgtccgcaccccgcttgggcagaggatccgccgggccttcatcgccgaggaggggtggctattggtggccctggactatagccagatagagctcagggtgctggcccacctctccggcgacgagaacctgatccgggtcttccaggaggggcgggacatccacacggagaccgccagctggatgttcggcgtcccccgggaggccgtggaccccctgatgcgccgggcggccaagaccatcaacttcggggtcctctacggcatgtcggcccaccgcctctcccaggagctagccatcccttacgaggaggcccaggccttcattgagcgctactttcagagcttccccaaggtgcgggcctggattgagaagaccctggaggagggcaggaggcgggggtacgtggagaccctcttcggccgccgccgctacgtgccagacctagaggcccgggtgaagagcgtgcgggaggcggccgagcgcatggccttcaacatgcccgtccagggcaccgccgccgacctcatgaagctggctatggtgaagctcttccccaggctggaggaaatgggggccaggatgctccttcaggtccacgacgagctggtcctcgaggccccaaaagagagggcggaggccgtggcccggctggccaaggaggtcatggagggggtgtatcccctggccgtgcccctggaggtggaggtggggataggggaggactggctctccgccaaggagtgataccaccccatgctggcccaagccagcatgggggccccggcaaaaggtttctggggaagttaccaggcatggtgggccgaaggaaacaggaaacaagggtatgagggttttttgccctaaagaaaggccagggggtcctcccgaaggaaggcttccagggggataccccctgggcccaggagtagcccctttcctccaaaggcctgggtgaaggcttttagccctttggtcctttgggaaggggcgcttttgacctccaaagccagaaggcgccttcccttcttcaagacgaagtcaacctcctggtccctttcccgccagtagtacacctcaaagcccccgtgggggccgtgggccagaaggtgggcgcccacggcggtttccacgagccgccccatgagggcggcgtccgcccacacctcctttggggaaagccccaagaccgccgtgatgagccccgtattaagggccaggagcttggggctcgaggcgcggcgccggaagggctcggcggcgtacttctgcag

SEQ ID NO: 3363 - DNA, 3026 bp, Artificial Sequence
  Description of Artificial Sequence: Synthetic DNA sequence of Thermus aquaticus DNA Polymerase A570E
atgagggggatgctgcccctctttgagcccaagggccgggtcctcctggtggacggccaccacctggcctaccgcaccttccacgccctgaagggcctcaccaccagccggggggagccggtgcaggcggtctacggcttcgccaagagcctcctcaaggccctcaaggaggacggggacgcggtgatcgtggtctttgacgccaaggccccctccttccgccacgaggcctacggggggtacaaggcgggccgggcccccacgccggaggactttccccggcaactcgccctcatcaaggagctggtggacctcctggggctggcgcgcctcgaggtcccgggctacgaggcggacgacgtcctggccagcctggccaagaaggcggaaaaggagggctacgaggtccgcatcctcaccgccgacaaagacctttaccagctcctttccgaccgcatccacgccctccaccccgaggggtacctcatcaccccggcctggctttgggaaaagtacggcctgaggcccgaccagtgggccgactaccgggccctgaccggggacgagtccgacaaccttcccggggtcaagggcatcggggagaagacggcgaggaagcttctggaggagtgggggagcctggaagccctcctcaagaacctggaccggctgaagcccgccatccgggagaagatcctggcccacatggacgatctgaagctctcctgggacctggccaaggtgcgcaccgacctgcccctggaggtggacttcgccaaaaggcgggagcccgaccgggagaggcttagggcctttctggagaggcttgagtttggcagcctcctccacgagttcggccttctggaaagccccaaggccctggaggaggccccctggcccccgccggaaggggccttcgtgggctttgtgctttcccgcaaggagcccatgtgggccgatcttctggccctggccgccgccagggggggccgggtccaccgggcccccgagccttataaagccctcagggacctgaaggaggcgcgggggcttctcgccaaagacctgagcgttctggccctgagggaaggccttggcctcccgcccggcgacgaccccatgctcctcgcctacctcctggacccttccaacaccacccccgagggggtggcccggcgctacggcggggagtggacggaggaggcgggggagcgggccgccctttccgagaggctcttcgccaacctgtgggggaggcttgagggggaggagaggctcctttggctttaccgggaggtggagaggcccctttccgctgtcctggcccacatggaggccacgggggtgcgcctggacgtggcctatctcagggccttgtccctggaggtggccgaggagatcgcccgcctcgaggccgaggtcttccgcctggccggccaccccttcaacctcaactcccgggaccagctggaaagggtcctctttgacgagctagggcttcccgccatcggcaagacggagaagaccggcaagcgctccaccagcgccgccgtcctggaggccctccgcgaggcccaccccatcgtggagaagatcctgcagtaccgggagctcaccaagctgaagagcacctacattgaccccttgccggacctcatccaccccaggacgggccgcctccacacccgcttcaaccagacggccacggaaacgggcaggctaagtagctccgatcccaacctccagaacatccccgtccgcaccccgcttgggcagaggatccgccgggccttcatcgccgaggaggggtggctattggtggccctggactatagccagatagagctcagggtgctggcccacctctccggcgacgagaacctgatccgggtcttccaggaggggcgggacatccacacggagaccgccagctggatgttcggcgtcccccgggaggccgtggaccccctgatgcgccgggcggccaagaccatcaacttcggggtcctctacggcatgtcggcccaccgcctctcccaggagctagccatcccttacgaggaggcccaggccttcattgagcgctactttcagagcttccccaaggtgcgggcctggattgagaagaccctggaggagggcaggaggcgggggtacgtggagaccctcttcggccgccgccgctacgtgccagacctagaggcccgggtgaagagcgtgcgggaggcggccgagcgcatggccttcaacatgcccgtccagggcaccgccgccgacctcatgaagctggctatggtgaagctcttccccaggctggaggaaatgggggccaggatgctccttcaggtccacgacgagctggtcctcgaggccccaaaagagagggcggaggccgtggcccggctggccaaggaggtcatggagggggtgtatcccctggccgtgcccctggaggtggaggtggggataggggaggactggctctccgccaaggagtgataccaccccatgctggcccaagccagcatgggggccccggcaaaaggtttctggggaagttaccaggcatggtgggccgaaggaaacaggaaacaagggtatgagggttttttgccctaaagaaaggccagggggtcctcccgaaggaaggcttccagggggataccccctgggcccaggagtagcccctttcctccaaaggcctgggtgaaggcttttagccctttggtcctttgggaaggggcgcttttgacctccaaagccagaaggcgccttcccttcttcaagacgaagtcaacctcctggtccctttcccgccagtagtacacctcaaagcccccgtgggggccgtgggccagaaggtgggcgcccacggcggtttccacgagccgccccatgagggcggcgtccgcccacacctcctttggggaaagccccaagaccgccgtgatgagccccgtattaagggccaggagcttggggctcgaggcgcggcgccggaagggctcggcggcgtacttctgcag

SEQ ID NO: 3364 - DNA, 3026 bp, Artificial Sequence
  Description of Artificial Sequence: Synthetic DNA sequence of Thermus aquaticus DNA Polymerase A570D
atgagggggatgctgcccctctttgagcccaagggccgggtcctcctggtggacggccaccacctggcctaccgcaccttccacgccctgaagggcctcaccaccagccggggggagccggtgcaggcggtctacggcttcgccaagagcctcctcaaggccctcaaggaggacggggacgcggtgatcgtggtctttgacgccaaggccccctccttccgccacgaggcctacggggggtacaaggcgggccgggcccccacgccggaggactttccccggcaactcgccctcatcaaggagctggtggacctcctggggctggcgcgcctcgaggtcccgggctacgaggcggacgacgtcctggccagcctggccaagaaggcggaaaaggagggctacgaggtccgcatcctcaccgccgacaaagacctttaccagctcctttccgaccgcatccacgccctccaccccgaggggtacctcatcaccccggcctggctttgggaaaagtacggcctgaggcccgaccagtgggccgactaccgggccctgaccggggacgagtccgacaaccttcccggggtcaagggcatcggggagaagacggcgaggaagcttctggaggagtgggggagcctggaagccctcctcaagaacctggaccggctgaagcccgccatccgggagaagatcctggcccacatggacgatctgaagctctcctgggacctggccaaggtgcgcaccgacctgcccctggaggtggacttcgccaaaaggcgggagcccgaccgggagaggcttagggcctttctggagaggcttgagtttggcagcctcctccacgagttcggccttctggaaagccccaaggccctggaggaggccccctggcccccgccggaaggggccttcgtgggctttgtgctttcccgcaaggagcccatgtgggccgatcttctggccctggccgccgccagggggggccgggtccaccgggcccccgagccttataaagccctcagggacctgaaggaggcgcgggggcttctcgccaaagacctgagcgttctggccctgagggaaggccttggcctcccgcccggcgacgaccccatgctcctcgcctacctcctggacccttccaacaccacccccgagggggtggcccggcgctacggcggggagtggacggaggaggcgggggagcgggccgccctttccgagaggctcttcgccaacctgtgggggaggcttgagggggaggagaggctcctttggctttaccgggaggtggagaggcccctttccgctgtcctggcccacatggaggccacgggggtgcgcctggacgtggcctatctcagggccttgtccctggaggtggccgaggagatcgcccgcctcgaggccgaggtcttccgcctggccggccaccccttcaacctcaactcccgggaccagctggaaagggtcctctttgacgagctagggcttcccgccatcggcaagacggagaagaccggcaagcgctccaccagcgccgccgtcctggaggccctccgcgaggcccaccccatcgtggagaagatcctgcagtaccgggagctcaccaagctgaagagcacctacattgaccccttgccggacctcatccaccccaggacgggccgcctccacacccgcttcaaccagacggccacggatacgggcaggctaagtagctccgatcccaacctccagaacatccccgtccgcaccccgcttgggcagaggatccgccgggccttcatcgccgaggaggggtggctattggtggccctggactatagccagatagagctcagggtgctggcccacctctccggcgacgagaacctgatccgggtcttccaggaggggcgggacatccacacggagaccgccagctggatgttcggcgtcccccgggaggccgtggaccccctgatgcgccgggcggccaagaccatcaacttcggggtcctctacggcatgtcggcccaccgcctctcccaggagctagccatcccttacgaggaggcccaggccttcattgagcgctactttcagagcttccccaaggtgcgggcctggattgagaagaccctggaggagggcaggaggcgggggtacgtggagaccctcttcggccgccgccgctacgtgccagacctagaggcccgggtgaagagcgtgcgggaggcggccgagcgcatggccttcaacatgcccgtccagggcaccgccgccgacctcatgaagctggctatggtgaagctcttccccaggctggaggaaatgggggccaggatgctccttcaggtccacgacgagctggtcctcgaggccccaaaagagagggcggaggccgtggcccggctggccaaggaggtcatggagggggtgtatcccctggccgtgcccctggaggtggaggtggggataggggaggactggctctccgccaaggagtgataccaccccatgctggcccaagccagcatgggggccccggcaaaaggtttctggggaagttaccaggcatggtgggccgaaggaaacaggaaacaagggtatgagggttttttgccctaaagaaaggccagggggtcctcccgaaggaaggcttccagggggataccccctgggcccaggagtagcccctttcctccaaaggcctgggtgaaggcttttagccctttggtcctttgggaaggggcgcttttgacctccaaagccagaaggcgccttcccttcttcaagacgaagtcaacctcctggtccctttcccgccagtagtacacctcaaagcccccgtgggggccgtgggccagaaggtgggcgcccacggcggtttccacgagccgccccatgagggcggcgtccgcccacacctcctttggggaaagccccaagaccgccgtgatgagccccgtattaagggccaggagcttggggctcgaggcgcggcgccggaagggctcggcggcgtacttctgcag

SEQ ID NO: 3365 - DNA, 3026 bp, Artificial Sequence
  Description of Artificial Sequence: Synthetic DNA sequence of Thermus aquaticus DNA Polymerase A570F
atgagggggatgctgcccctctttgagcccaagggccgggtcctcctggtggacggccaccacctggcctaccgcaccttccacgccctgaagggcctcaccaccagccggggggagccggtgcaggcggtctacggcttcgccaagagcctcctcaaggccctcaaggaggacggggacgcggtgatcgtggtctttgacgccaaggccccctccttccgccacgaggcctacggggggtacaaggcgggccgggcccccacgccggaggactttccccggcaactcgccctcatcaaggagctggtggacctcctggggctggcgcgcctcgaggtcccgggctacgaggcggacgacgtcctggccagcctggccaagaaggcggaaaaggagggctacgaggtccgcatcctcaccgccgacaaagacctttaccagctcctttccgaccgcatccacgccctccaccccgaggggtacctcatcaccccggcctggctttgggaaaagtacggcctgaggcccgaccagtgggccgactaccgggccctgaccggggacgagtccgacaaccttcccggggtcaagggcatcggggagaagacggcgaggaagcttctggaggagtgggggagcctggaagccctcctcaagaacctggaccggctgaagcccgccatccgggagaagatcctggcccacatggacgatctgaagctctcctgggacctggccaaggtgcgcaccgacctgcccctggaggtggacttcgccaaaaggcgggagcccgaccgggagaggcttagggcctttctggagaggcttgagtttggcagcctcctccacgagttcggccttctggaaagccccaaggccctggaggaggccccctggcccccgccggaaggggccttcgtgggctttgtgctttcccgcaaggagcccatgtgggccgatcttctggccctggccgccgccagggggggccgggtccaccgggcccccgagccttataaagccctcagggacctgaaggaggcgcgggggcttctcgccaaagacctgagcgttctggccctgagggaaggccttggcctcccgcccggcgacgaccccatgctcctcgcctacctcctggacccttccaacaccacccccgagggggtggcccggcgctacggcggggagtggacggaggaggcgggggagcgggccgccctttccgagaggctcttcgccaacctgtgggggaggcttgagggggaggagaggctcctttggctttaccgggaggtggagaggcccctttccgctgtcctggcccacatggaggccacgggggtgcgcctggacgtggcctatctcagggccttgtccctggaggtggccgaggagatcgcccgcctcgaggccgaggtcttccgcctggccggccaccccttcaacctcaactcccgggaccagctggaaagggtcctctttgacgagctagggcttcccgccatcggcaagacggagaagaccggcaagcgctccaccagcgccgccgtcctggaggccctccgcgaggcccaccccatcgtggagaagatcctgcagtaccgggagctcaccaagctgaagagcacctacattgaccccttgccggacctcatccaccccaggacgggccgcctccacacccgcttcaaccagacggccacgtttacgggcaggctaagtagctccgatcccaacctccagaacatccccgtccgcaccccgcttgggcagaggatccgccgggccttcatcgccgaggaggggtggctattggtggccctggactatagccagatagagctcagggtgctggcccacctctccggcgacgagaacctgatccgggtcttccaggaggggcgggacatccacacggagaccgccagctggatgttcggcgtcccccgggaggccgtggaccccctgatgcgccgggcggccaagaccatcaacttcggggtcctctacggcatgtcggcccaccgcctctcccaggagctagccatcccttacgaggaggcccaggccttcattgagcgctactttcagagcttccccaaggtgcgggcctggattgagaagaccctggaggagggcaggaggcgggggtacgtggagaccctcttcggccgccgccgctacgtgccagacctagaggcccgggtgaagagcgtgcgggaggcggccgagcgcatggccttcaacatgcccgtccagggcaccgccgccgacctcatgaagctggctatggtgaagctcttccccaggctggaggaaatgggggccaggatgctccttcaggtccacgacgagctggtcctcgaggccccaaaagagagggcggaggccgtggcccggctggccaaggaggtcatggagggggtgtatcccctggccgtgcccctggaggtggaggtggggataggggaggactggctctccgccaaggagtgataccaccccatgctggcccaagccagcatgggggccccggcaaaaggtttctggggaagttaccaggcatggtgggccgaaggaaacaggaaacaagggtatgagggttttttgccctaaagaaaggccagggggtcctcccgaaggaaggcttccagggggataccccctgggcccaggagtagcccctttcctccaaaggcctgggtgaaggcttttagccctttggtcctttgggaaggggcgcttttgacctccaaagccagaaggcgccttcccttcttcaagacgaagtcaacctcctggtccctttcccgccagtagtacacctcaaagcccccgtgggggccgtgggccagaaggtgggcgcccacggcggtttccacgagccgccccatgagggcggcgtccgcccacacctcctttggggaaagccccaagaccgccgtgatgagccccgtattaagggccaggagcttggggctcgaggcgcggcgccggaagggctcggcggcgtacttctgcag

SEQ ID NO: 3366 - DNA, 3026 bp, Artificial Sequence
  Description of Artificial Sequence: Synthetic DNA sequence of Thermus aquaticus DNA Polymerase A570S
atgagggggatgctgcccctctttgagcccaagggccgggtcctcctggtggacggccaccacctggcctaccgcaccttccacgccctgaagggcctcaccaccagccggggggagccggtgcaggcggtctacggcttcgccaagagcctcctcaaggccctcaaggaggacggggacgcggtgatcgtggtctttgacgccaaggccccctccttccgccacgaggcctacggggggtacaaggcgggccgggcccccacgccggaggactttccccggcaactcgccctcatcaaggagctggtggacctcctggggctggcgcgcctcgaggtcccgggctacgaggcggacgacgtcctggccagcctggccaagaaggcggaaaaggagggctacgaggtccgcatcctcaccgccgacaaagacctttaccagctcctttccgaccgcatccacgccctccaccccgaggggtacctcatcaccccggcctggctttgggaaaagtacggcctgaggcccgaccagtgggccgactaccgggccctgaccggggacgagtccgacaaccttcccggggtcaagggcatcggggagaagacggcgaggaagcttctggaggagtgggggagcctggaagccctcctcaagaacctggaccggctgaagcccgccatccgggagaagatcctggcccacatggacgatctgaagctctcctgggacctggccaaggtgcgcaccgacctgcccctggaggtggacttcgccaaaaggcgggagcccgaccgggagaggcttagggcctttctggagaggcttgagtttggcagcctcctccacgagttcggccttctggaaagccccaaggccctggaggaggccccctggcccccgccggaaggggccttcgtgggctttgtgctttcccgcaaggagcccatgtgggccgatcttctggccctggccgccgccagggggggccgggtccaccgggcccccgagccttataaagccctcagggacctgaaggaggcgcgggggcttctcgccaaagacctgagcgttctggccctgagggaaggccttggcctcccgcccggcgacgaccccatgctcctcgcctacctcctggacccttccaacaccacccccgagggggtggcccggcgctacggcggggagtggacggaggaggcgggggagcgggccgccctttccgagaggctcttcgccaacctgtgggggaggcttgagggggaggagaggctcctttggctttaccgggaggtggagaggcccctttccgctgtcctggcccacatggaggccacgggggtgcgcctggacgtggcctatctcagggccttgtccctggaggtggccgaggagatcgcccgcctcgaggccgaggtcttccgcctggccggccaccccttcaacctcaactcccgggaccagctggaaagggtcctctttgacgagctagggcttcccgccatcggcaagacggagaagaccggcaagcgctccaccagcgccgccgtcctggaggccctccgcgaggcccaccccatcgtggagaagatcctgcagtaccgggagctcaccaagctgaagagcacctacattgaccccttgccggacctcatccaccccaggacgggccgcctccacacccgcttcaaccagacggccacgtctacgggcaggctaagtagctccgatcccaacctccagaacatccccgtccgcaccccgcttgggcagaggatccgccgggccttcatcgccgaggaggggtggctattggtggccctggactatagccagatagagctcagggtgctggcccacctctccggcgacgagaacctgatccgggtcttccaggaggggcgggacatccacacggagaccgccagctggatgttcggcgtcccccgggaggccgtggaccccctgatgcgccgggcggccaagaccatcaacttcggggtcctctacggcatgtcggcccaccgcctctcccaggagctagccatcccttacgaggaggcccaggccttcattgagcgctactttcagagcttccccaaggtgcgggcctggattgagaagaccctggaggagggcaggaggcgggggtacgtggagaccctcttcggccgccgccgctacgtgccagacctagaggcccgggtgaagagcgtgcgggaggcggccgagcgcatggccttcaacatgcccgtccagggcaccgccgccgacctcatgaagctggctatggtgaagctcttccccaggctggaggaaatgggggccaggatgctccttcaggtccacgacgagctggtcctcgaggccccaaaagagagggcggaggccgtggcccggctggccaaggaggtcatggagggggtgtatcccctggccgtgcccctggaggtggaggtggggataggggaggactggctctccgccaaggagtgataccaccccatgctggcccaagccagcatgggggccccggcaaaaggtttctggggaagttaccaggcatggtgggccgaaggaaacaggaaacaagggtatgagggttttttgccctaaagaaaggccagggggtcctcccgaaggaaggcttccagggggataccccctgggcccaggagtagcccctttcctccaaaggcctgggtgaaggcttttagccctttggtcctttgggaaggggcgcttttgacctccaaagccagaaggcgccttcccttcttcaagacgaagtcaacctcctggtccctttcccgccagtagtacacctcaaagcccccgtgggggccgtgggccagaaggtgggcgcccacggcggtttccacgagccgccccatgagggcggcgtccgcccacacctcctttggggaaagccccaagaccgccgtgatgagccccgtattaagggccaggagcttggggctcgaggcgcggcgccggaagggctcggcggcgtacttctgcag

SEQ ID NO: 3367 - DNA, 3026 bp, Artificial Sequence
  Description of Artificial Sequence: Synthetic DNA sequence of Thermus aquaticus DNA Polymerase A570Y
atgagggggatgctgcccctctttgagcccaagggccgggtcctcctggtggacggccaccacctggcctaccgcaccttccacgccctgaagggcctcaccaccagccggggggagccggtgcaggcggtctacggcttcgccaagagcctcctcaaggccctcaaggaggacggggacgcggtgatcgtggtctttgacgccaaggccccctccttccgccacgaggcctacggggggtacaaggcgggccgggcccccacgccggaggactttccccggcaactcgccctcatcaaggagctggtggacctcctggggctggcgcgcctcgaggtcccgggctacgaggcggacgacgtcctggccagcctggccaagaaggcggaaaaggagggctacgaggtccgcatcctcaccgccgacaaagacctttaccagctcctttccgaccgcatccacgccctccaccccgaggggtacctcatcaccccggcctggctttgggaaaagtacggcctgaggcccgaccagtgggccgactaccgggccctgaccggggacgagtccgacaaccttcccggggtcaagggcatcggggagaagacggcgaggaagcttctggaggagtgggggagcctggaagccctcctcaagaacctggaccggctgaagcccgccatccgggagaagatcctggcccacatggacgatctgaagctctcctgggacctggccaaggtgcgcaccgacctgcccctggaggtggacttcgccaaaaggcgggagcccgaccgggagaggcttagggcctttctggagaggcttgagtttggcagcctcctccacgagttcggccttctggaaagccccaaggccctggaggaggccccctggcccccgccggaaggggccttcgtgggctttgtgctttcccgcaaggagcccatgtgggccgatcttctggccctggccgccgccagggggggccgggtccaccgggcccccgagccttataaagccctcagggacctgaaggaggcgcgggggcttctcgccaaagacctgagcgttctggccctgagggaaggccttggcctcccgcccggcgacgaccccatgctcctcgcctacctcctggacccttccaacaccacccccgagggggtggcccggcgctacggcggggagtggacggaggaggcgggggagcgggccgccctttccgagaggctcttcgccaacctgtgggggaggcttgagggggaggagaggctcctttggctttaccgggaggtggagaggcccctttccgctgtcctggcccacatggaggccacgggggtgcgcctggacgtggcctatctcagggccttgtccctggaggtggccgaggagatcgcccgcctcgaggccgaggtcttccgcctggccggccaccccttcaacctcaactcccgggaccagctggaaagggtcctctttgacgagctagggcttcccgccatcggcaagacggagaagaccggcaagcgctccaccagcgccgccgtcctggaggccctccgcgaggcccaccccatcgtggagaagatcctgcagtaccgggagctcaccaagctgaagagcacctacattgaccccttgccggacctcatccaccccaggacgggccgcctccacacccgcttcaaccagacggccacgtatacgggcaggctaagtagctccgatcccaacctccagaacatccccgtccgcaccccgcttgggcagaggatccgccgggccttcatcgccgaggaggggtggctattggtggccctggactatagccagatagagctcagggtgctggcccacctctccggcgacgagaacctgatccgggtcttccaggaggggcgggacatccacacggagaccgccagctggatgttcggcgtcccccgggaggccgtggaccccctgatgcgccgggcggccaagaccatcaacttcggggtcctctacggcatgtcggcccaccgcctctcccaggagctagccatcccttacgaggaggcccaggccttcattgagcgctactttcagagcttccccaaggtgcgggcctggattgagaagaccctggaggagggcaggaggcgggggtacgtggagaccctcttcggccgccgccgctacgtgccagacctagaggcccgggtgaagagcgtgcgggaggcggccgagcgcatggccttcaacatgcccgtccagggcaccgccgccgacctcatgaagctggctatggtgaagctcttccccaggctggaggaaatgggggccaggatgctccttcaggtccacgacgagctggtcctcgaggccccaaaagagagggcggaggccgtggcccggctggccaaggaggtcatggagggggtgtatcccctggccgtgcccctggaggtggaggtggggataggggaggactggctctccgccaaggagtgataccaccccatgctggcccaagccagcatgggggccccggcaaaaggtttctggggaagttaccaggcatggtgggccgaaggaaacaggaaacaagggtatgagggttttttgccctaaagaaaggccagggggtcctcccgaaggaaggcttccagggggataccccctgggcccaggagtagcccctttcctccaaaggcctgggtgaaggcttttagccctttggtcctttgggaaggggcgcttttgacctccaaagccagaaggcgccttcccttcttcaagacgaagtcaacctcctggtccctttcccgccagtagtacacctcaaagcccccgtgggggccgtgggccagaaggtgggcgcccacggcggtttccacgagccgccccatgagggcggcgtccgcccacacctcctttggggaaagccccaagaccgccgtgatgagccccgtattaagggccaggagcttggggctcgaggcgcggcgccggaagggctcggcggcgtacttctgcag

SEQ ID NO: 3368 - DNA, 3026 bp, Artificial Sequence
  Description of Artificial Sequence: Synthetic DNA sequence of Thermus aquaticus DNA Polymerase A570W
atgagggggatgctgcccctctttgagcccaagggccgggtcctcctggtggacggccaccacctggcctaccgcaccttccacgccctgaagggcctcaccaccagccggggggagccggtgcaggcggtctacggcttcgccaagagcctcctcaaggccctcaaggaggacggggacgcggtgatcgtggtctttgacgccaaggccccctccttccgccacgaggcctacggggggtacaaggcgggccgggcccccacgccggaggactttccccggcaactcgccctcatcaaggagctggtggacctcctggggctggcgcgcctcgaggtcccgggctacgaggcggacgacgtcctggccagcctggccaagaaggcggaaaaggagggctacgaggtccgcatcctcaccgccgacaaagacctttaccagctcctttccgaccgcatccacgccctccaccccgaggggtacctcatcaccccggcctggctttgggaaaagtacggcctgaggcccgaccagtgggccgactaccgggccctgaccggggacgagtccgacaaccttcccggggtcaagggcatcggggagaagacggcgaggaagcttctggaggagtgggggagcctggaagccctcctcaagaacctggaccggctgaagcccgccatccgggagaagatcctggcccacatggacgatctgaagctctcctgggacctggccaaggtgcgcaccgacctgcccctggaggtggacttcgccaaaaggcgggagcccgaccgggagaggcttagggcctttctggagaggcttgagtttggcagcctcctccacgagttcggccttctggaaagccccaaggccctggaggaggccccctggcccccgccggaaggggccttcgtgggctttgtgctttcccgcaaggagcccatgtgggccgatcttctggccctggccgccgccagggggggccgggtccaccgggcccccgagccttataaagccctcagggacctgaaggaggcgcgggggcttctcgccaaagacctgagcgttctggccctgagggaaggccttggcctcccgcccggcgacgaccccatgctcctcgcctacctcctggacccttccaacaccacccccgagggggtggcccggcgctacggcggggagtggacggaggaggcgggggagcgggccgccctttccgagaggctcttcgccaacctgtgggggaggcttgagggggaggagaggctcctttggctttaccgggaggtggagaggcccctttccgctgtcctggcccacatggaggccacgggggtgcgcctggacgtggcctatctcagggccttgtccctggaggtggccgaggagatcgcccgcctcgaggccgaggtcttccgcctggccggccaccccttcaacctcaactcccgggaccagctggaaagggtcctctttgacgagctagggcttcccgccatcggcaagacggagaagaccggcaagcgctccaccagcgccgccgtcctggaggccctccgcgaggcccaccccatcgtggagaagatcctgcagtaccgggagctcaccaagctgaagagcacctacattgaccccttgccggacctcatccaccccaggacgggccgcctccacacccgcttcaaccagacggccacgtggacgggcaggctaagtagctccgatcccaacctccagaacatccccgtccgcaccccgcttgggcagaggatccgccgggccttcatcgccgaggaggggtggctattggtggccctggactatagccagatagagctcagggtgctggcccacctctccggcgacgagaacctgatccgggtcttccaggaggggcgggacatccacacggagaccgccagctggatgttcggcgtcccccgggaggccgtggaccccctgatgcgccgggcggccaagaccatcaacttcggggtcctctacggcatgtcggcccaccgcctctcccaggagctagccatcccttacgaggaggcccaggccttcattgagcgctactttcagagcttccccaaggtgcgggcctggattgagaagaccctggaggagggcaggaggcgggggtacgtggagaccctcttcggccgccgccgctacgtgccagacctagaggcccgggtgaagagcgtgcgggaggcggccgagcgcatggccttcaacatgcccgtccagggcaccgccgccgacctcatgaagctggctatggtgaagctcttccccaggctggaggaaatgggggccaggatgctccttcaggtccacgacgagctggtcctcgaggccccaaaagagagggcggaggccgtggcccggctggccaaggaggtcatggagggggtgtatcccctggccgtgcccctggaggtggaggtggggataggggaggactggctctccgccaaggagtgataccaccccatgctggcccaagccagcatgggggccccggcaaaaggtttctggggaagttaccaggcatggtgggccgaaggaaacaggaaacaagggtatgagggttttttgccctaaagaaaggccagggggtcctcccgaaggaaggcttccagggggataccccctgggcccaggagtagcccctttcctccaaaggcctgggtgaaggcttttagccctttggtcctttgggaaggggcgcttttgacctccaaagccagaaggcgccttcccttcttcaagacgaagtcaacctcctggtccctttcccgccagtagtacacctcaaagcccccgtgggggccgtgggccagaaggtgggcgcccacggcggtttccacgagccgccccatgagggcggcgtccgcccacacctcctttggggaaagccccaagaccgccgtgatgagccccgtattaagggccaggagcttggggctcgaggcgcggcgccggaagggctcggcggcgtacttctgcag

SEQ ID NO: 3369 - DNA, 3026 bp, Artificial Sequence
  Description of Artificial Sequence: Synthetic DNA sequence of Thermus aquaticus DNA Polymerase A570P
atgagggggatgctgcccctctttgagcccaagggccgggtcctcctggtggacggccaccacctggcctaccgcaccttccacgccctgaagggcctcaccaccagccggggggagccggtgcaggcggtctacggcttcgccaagagcctcctcaaggccctcaaggaggacggggacgcggtgatcgtggtctttgacgccaaggccccctccttccgccacgaggcctacggggggtacaaggcgggccgggcccccacgccggaggactttccccggcaactcgccctcatcaaggagctggtggacctcctggggctggcgcgcctcgaggtcccgggctacgaggcggacgacgtcctggccagcctggccaagaaggcggaaaaggagggctacgaggtccgcatcctcaccgccgacaaagacctttaccagctcctttccgaccgcatccacgccctccaccccgaggggtacctcatcaccccggcctggctttgggaaaagtacggcctgaggcccgaccagtgggccgactaccgggccctgaccggggacgagtccgacaaccttcccggggtcaagggcatcggggagaagacggcgaggaagcttctggaggagtgggggagcctggaagccctcctcaagaacctggaccggctgaagcccgccatccgggagaagatcctggcccacatggacgatctgaagctctcctgggacctggccaaggtgcgcaccgacctgcccctggaggtggacttcgccaaaaggcgggagcccgaccgggagaggcttagggcctttctggagaggcttgagtttggcagcctcctccacgagttcggccttctggaaagccccaaggccctggaggaggccccctggcccccgccggaaggggccttcgtgggctttgtgctttcccgcaaggagcccatgtgggccgatcttctggccctggccgccgccagggggggccgggtccaccgggcccccgagccttataaagccctcagggacctgaaggaggcgcgggggcttctcgccaaagacctgagcgttctggccctgagggaaggccttggcctcccgcccggcgacgaccccatgctcctcgcctacctcctggacccttccaacaccacccccgagggggtggcccggcgctacggcggggagtggacggaggaggcgggggagcgggccgccctttccgagaggctcttcgccaacctgtgggggaggcttgagggggaggagaggctcctttggctttaccgggaggtggagaggcccctttccgctgtcctggcccacatggaggccacgggggtgcgcctggacgtggcctatctcagggccttgtccctggaggtggccgaggagatcgcccgcctcgaggccgaggtcttccgcctggccggccaccccttcaacctcaactcccgggaccagctggaaagggtcctctttgacgagctagggcttcccgccatcggcaagacggagaagaccggcaagcgctccaccagcgccgccgtcctggaggccctccgcgaggcccaccccatcgtggagaagatcctgcagtaccgggagctcaccaagctgaagagcacctacattgaccccttgccggacctcatccaccccaggacgggccgcctccacacccgcttcaaccagacggccacgcctacgggcaggctaagtagctccgatcccaacctccagaacatccccgtccgcaccccgcttgggcagaggatccgccgggccttcatcgccgaggaggggtggctattggtggccctggactatagccagatagagctcagggtgctggcccacctctccggcgacgagaacctgatccgggtcttccaggaggggcgggacatccacacggagaccgccagctggatgttcggcgtcccccgggaggccgtggaccccctgatgcgccgggcggccaagaccatcaacttcggggtcctctacggcatgtcggcccaccgcctctcccaggagctagccatcccttacgaggaggcccaggccttcattgagcgctactttcagagcttccccaaggtgcgggcctggattgagaagaccctggaggagggcaggaggcgggggtacgtggagaccctcttcggccgccgccgctacgtgccagacctagaggcccgggtgaagagcgtgcgggaggcggccgagcgcatggccttcaacatgcccgtccagggcaccgccgccgacctcatgaagctggctatggtgaagctcttccccaggctggaggaaatgggggccaggatgctccttcaggtccacgacgagctggtcctcgaggccccaaaagagagggcggaggccgtggcccggctggccaaggaggtcatggagggggtgtatcccctggccgtgcccctggaggtggaggtggggataggggaggactggctctccgccaaggagtgataccaccccatgctggcccaagccagcatgggggccccggcaaaaggtttctggggaagttaccaggcatggtgggccgaaggaaacaggaaacaagggtatgagggttttttgccctaaagaaaggccagggggtcctcccgaaggaaggcttccagggggataccccctgggcccaggagtagcccctttcctccaaaggcctgggtgaaggcttttagccctttggtcctttgggaaggggcgcttttgacctccaaagccagaaggcgccttcccttcttcaagacgaagtcaacctcctggtccctttcccgccagtagtacacctcaaagcccccgtgggggccgtgggccagaaggtgggcgcccacggcggtttccacgagccgccccatgagggcggcgtccgcccacacctcctttggggaaagccccaagaccgccgtgatgagccccgtattaagggccaggagcttggggctcgaggcgcggcgccggaagggctcggcggcgtacttctgcag

SEQ ID NO: 3370 - DNA, 3026 bp, Artificial Sequence
  Description of Artificial Sequence: Synthetic DNA sequence of Thermus aquaticus DNA Polymerase A570M
atgagggggatgctgcccctctttgagcccaagggccgggtcctcctggtggacggccaccacctggcctaccgcaccttccacgccctgaagggcctcaccaccagccggggggagccggtgcaggcggtctacggcttcgccaagagcctcctcaaggccctcaaggaggacggggacgcggtgatcgtggtctttgacgccaaggccccctccttccgccacgaggcctacggggggtacaaggcgggccgggcccccacgccggaggactttccccggcaactcgccctcatcaaggagctggtggacctcctggggctggcgcgcctcgaggtcccgggctacgaggcggacgacgtcctggccagcctggccaagaaggcggaaaaggagggctacgaggtccgcatcctcaccgccgacaaagacctttaccagctcctttccgaccgcatccacgccctccaccccgaggggtacctcatcaccccggcctggctttgggaaaagtacggcctgaggcccgaccagtgggccgactaccgggccctgaccggggacgagtccgacaaccttcccggggtcaagggcatcggggagaagacggcgaggaagcttctggaggagtgggggagcctggaagccctcctcaagaacctggaccggctgaagcccgccatccgggagaagatcctggcccacatggacgatctgaagctctcctgggacctggccaaggtgcgcaccgacctgcccctggaggtggacttcgccaaaaggcgggagcccgaccgggagaggcttagggcctttctggagaggcttgagtttggcagcctcctccacgagttcggccttctggaaagccccaaggccctggaggaggccccctggcccccgccggaaggggccttcgtgggctttgtgctttcccgcaaggagcccatgtgggccgatcttctggccctggccgccgccagggggggccgggtccaccgggcccccgagccttataaagccctcagggacctgaaggaggcgcgggggcttctcgccaaagacctgagcgttctggccctgagggaaggccttggcctcccgcccggcgacgaccccatgctcctcgcctacctcctggacccttccaacaccacccccgagggggtggcccggcgctacggcggggagtggacggaggaggcgggggagcgggccgccctttccgagaggctcttcgccaacctgtgggggaggcttgagggggaggagaggctcctttggctttaccgggaggtggagaggcccctttccgctgtcctggcccacatggaggccacgggggtgcgcctggacgtggcctatctcagggccttgtccctggaggtggccgaggagatcgcccgcctcgaggccgaggtcttccgcctggccggccaccccttcaacctcaactcccgggaccagctggaaagggtcctctttgacgagctagggcttcccgccatcggcaagacggagaagaccggcaagcgctccaccagcgccgccgtcctggaggccctccgcgaggcccaccccatcgtggagaagatcctgcagtaccgggagctcaccaagctgaagagcacctacattgaccccttgccggacctcatccaccccaggacgggccgcctccacacccgcttcaaccagacggccacgatgacgggcaggctaagtagctccgatcccaacctccagaacatccccgtccgcaccccgcttgggcagaggatccgccgggccttcatcgccgaggaggggtggctattggtggccctggactatagccagatagagctcagggtgctggcccacctctccggcgacgagaacctgatccgggtcttccaggaggggcgggacatccacacggagaccgccagctggatgttcggcgtcccccgggaggccgtggaccccctgatgcgccgggcggccaagaccatcaacttcggggtcctctacggcatgtcggcccaccgcctctcccaggagctagccatcccttacgaggaggcccaggccttcattgagcgctactttcagagcttccccaaggtgcgggcctggattgagaagaccctggaggagggcaggaggcgggggtacgtggagaccctcttcggccgccgccgctacgtgccagacctagaggcccgggtgaagagcgtgcgggaggcggccgagcgcatggccttcaacatgcccgtccagggcaccgccgccgacctcatgaagctggctatggtgaagctcttccccaggctggaggaaatgggggccaggatgctccttcaggtccacgacgagctggtcctcgaggccccaaaagagagggcggaggccgtggcccggctggccaaggaggtcatggagggggtgtatcccctggccgtgcccctggaggtggaggtggggataggggaggactggctctccgccaaggagtgataccaccccatgctggcccaagccagcatgggggccccggcaaaaggtttctggggaagttaccaggcatggtgggccgaaggaaacaggaaacaagggtatgagggttttttgccctaaagaaaggccagggggtcctcccgaaggaaggcttccagggggataccccctgggcccaggagtagcccctttcctccaaaggcctgggtgaaggcttttagccctttggtcctttgggaaggggcgcttttgacctccaaagccagaaggcgccttcccttcttcaagacgaagtcaacctcctggtccctttcccgccagtagtacacctcaaagcccccgtgggggccgtgggccagaaggtgggcgcccacggcggtttccacgagccgccccatgagggcggcgtccgcccacacctcctttggggaaagccccaagaccgccgtgatgagccccgtattaagggccaggagcttggggctcgaggcgcggcgccggaagggctcggcggcgtacttctgcag

SEQ ID NO: 3371 - DNA, 3026 bp, Artificial Sequence
  Description of Artificial Sequence: Synthetic DNA sequence of Thermus aquaticus DNA Polymerase A570T
atgagggggatgctgcccctctttgagcccaagggccgggtcctcctggtggacggccaccacctggcctaccgcaccttccacgccctgaagggcctcaccaccagccggggggagccggtgcaggcggtctacggcttcgccaagagcctcctcaaggccctcaaggaggacggggacgcggtgatcgtggtctttgacgccaaggccccctccttccgccacgaggcctacggggggtacaaggcgggccgggcccccacgccggaggactttccccggcaactcgccctcatcaaggagctggtggacctcctggggctggcgcgcctcgaggtcccgggctacgaggcggacgacgtcctggccagcctggccaagaaggcggaaaaggagggctacgaggtccgcatcctcaccgccgacaaagacctttaccagctcctttccgaccgcatccacgccctccaccccgaggggtacctcatcaccccggcctggctttgggaaaagtacggcctgaggcccgaccagtgggccgactaccgggccctgaccggggacgagtccgacaaccttcccggggtcaagggcatcggggagaagacggcgaggaagcttctggaggagtgggggagcctggaagccctcctcaagaacctggaccggctgaagcccgccatccgggagaagatcctggcccacatggacgatctgaagctctcctgggacctggccaaggtgcgcaccgacctgcccctggaggtggacttcgccaaaaggcgggagcccgaccgggagaggcttagggcctttctggagaggcttgagtttggcagcctcctccacgagttcggccttctggaaagccccaaggccctggaggaggccccctggcccccgccggaaggggccttcgtgggctttgtgctttcccgcaaggagcccatgtgggccgatcttctggccctggccgccgccagggggggccgggtccaccgggcccccgagccttataaagccctcagggacctgaaggaggcgcgggggcttctcgccaaagacctgagcgttctggccctgagggaaggccttggcctcccgcccggcgacgaccccatgctcctcgcctacctcctggacccttccaacaccacccccgagggggtggcccggcgctacggcggggagtggacggaggaggcgggggagcgggccgccctttccgagaggctcttcgccaacctgtgggggaggcttgagggggaggagaggctcctttggctttaccgggaggtggagaggcccctttccgctgtcctggcccacatggaggccacgggggtgcgcctggacgtggcctatctcagggccttgtccctggaggtggccgaggagatcgcccgcctcgaggccgaggtcttccgcctggccggccaccccttcaacctcaactcccgggaccagctggaaagggtcctctttgacgagctagggcttcccgccatcggcaagacggagaagaccggcaagcgctccaccagcgccgccgtcctggaggccctccgcgaggcccaccccatcgtggagaagatcctgcagtaccgggagctcaccaagctgaagagcacctacattgaccccttgccggacctcatccaccccaggacgggccgcctccacacccgcttcaaccagacggccacgactacgggcaggctaagtagctccgatcccaacctccagaacatccccgtccgcaccccgcttgggcagaggatccgccgggccttcatcgccgaggaggggtggctattggtggccctggactatagccagatagagctcagggtgctggcccacctctccggcgacgagaacctgatccgggtcttccaggaggggcgggacatccacacggagaccgccagctggatgttcggcgtcccccgggaggccgtggaccccctgatgcgccgggcggccaagaccatcaacttcggggtcctctacggcatgtcggcccaccgcctctcccaggagctagccatcccttacgaggaggcccaggccttcattgagcgctactttcagagcttccccaaggtgcgggcctggattgagaagaccctggaggagggcaggaggcgggggtacgtggagaccctcttcggccgccgccgctacgtgccagacctagaggcccgggtgaagagcgtgcgggaggcggccgagcgcatggccttcaacatgcccgtccagggcaccgccgccgacctcatgaagctggctatggtgaagctcttccccaggctggaggaaatgggggccaggatgctccttcaggtccacgacgagctggtcctcgaggccccaaaagagagggcggaggccgtggcccggctggccaaggaggtcatggagggggtgtatcccctggccgtgcccctggaggtggaggtggggataggggaggactggctctccgccaaggagtgataccaccccatgctggcccaagccagcatgggggccccggcaaaaggtttctggggaagttaccaggcatggtgggccgaaggaaacaggaaacaagggtatgagggttttttgccctaaagaaaggccagggggtcctcccgaaggaaggcttccagggggataccccctgggcccaggagtagcccctttcctccaaaggcctgggtgaaggcttttagccctttggtcctttgggaaggggcgcttttgacctccaaagccagaaggcgccttcccttcttcaagacgaagtcaacctcctggtccctttcccgccagtagtacacctcaaagcccccgtgggggccgtgggccagaaggtgggcgcccacggcggtttccacgagccgccccatgagggcggcgtccgcccacacctcctttggggaaagccccaagaccgccgtgatgagccccgtattaagggccaggagcttggggctcgaggcgcggcgccggaagggctcggcggcgtacttctgcag

SEQ ID NO: 3372 - DNA, 3026 bp, Artificial Sequence
  Description of Artificial Sequence: Synthetic DNA sequence of Thermus aquaticus DNA Polymerase A570N
atgagggggatgctgcccctctttgagcccaagggccgggtcctcctggtggacggccaccacctggcctaccgcaccttccacgccctgaagggcctcaccaccagccggggggagccggtgcaggcggtctacggcttcgccaagagcctcctcaaggccctcaaggaggacggggacgcggtgatcgtggtctttgacgccaaggccccctccttccgccacgaggcctacggggggtacaaggcgggccgggcccccacgccggaggactttccccggcaactcgccctcatcaaggagctggtggacctcctggggctggcgcgcctcgaggtcccgggctacgaggcggacgacgtcctggccagcctggccaagaaggcggaaaaggagggctacgaggtccgcatcctcaccgccgacaaagacctttaccagctcctttccgaccgcatccacgccctccaccccgaggggtacctcatcaccccggcctggctttgggaaaagtacggcctgaggcccgaccagtgggccgactaccgggccctgaccggggacgagtccgacaaccttcccggggtcaagggcatcggggagaagacggcgaggaagcttctggaggagtgggggagcctggaagccctcctcaagaacctggaccggctgaagcccgccatccgggagaagatcctggcccacatggacgatctgaagctctcctgggacctggccaaggtgcgcaccgacctgcccctggaggtggacttcgccaaaaggcgggagcccgaccgggagaggcttagggcctttctggagaggcttgagtttggcagcctcctccacgagttcggccttctggaaagccccaaggccctggaggaggccccctggcccccgccggaaggggccttcgtgggctttgtgctttcccgcaaggagcccatgtgggccgatcttctggccctggccgccgccagggggggccgggtccaccgggcccccgagccttataaagccctcagggacctgaaggaggcgcgggggcttctcgccaaagacctgagcgttctggccctgagggaaggccttggcctcccgcccggcgacgaccccatgctcctcgcctacctcctggacccttccaacaccacccccgagggggtggcccggcgctacggcggggagtggacggaggaggcgggggagcgggccgccctttccgagaggctcttcgccaacctgtgggggaggcttgagggggaggagaggctcctttggctttaccgggaggtggagaggcccctttccgctgtcctggcccacatggaggccacgggggtgcgcctggacgtggcctatctcagggccttgtccctggaggtggccgaggagatcgcccgcctcgaggccgaggtcttccgcctggccggccaccccttcaacctcaactcccgggaccagctggaaagggtcctctttgacgagctagggcttcccgccatcggcaagacggagaagaccggcaagcgctccaccagcgccgccgtcctggaggccctccgcgaggcccaccccatcgtggagaagatcctgcagtaccgggagctcaccaagctgaagagcacctacattgaccccttgccggacctcatccaccccaggacgggccgcctccacacccgcttcaaccagacggccacgaatacgggcaggctaagtagctccgatcccaacctccagaacatccccgtccgcaccccgcttgggcagaggatccgccgggccttcatcgccgaggaggggtggctattggtggccctggactatagccagatagagctcagggtgctggcccacctctccggcgacgagaacctgatccgggtcttccaggaggggcgggacatccacacggagaccgccagctggatgttcggcgtcccccgggaggccgtggaccccctgatgcgccgggcggccaagaccatcaacttcggggtcctctacggcatgtcggcccaccgcctctcccaggagctagccatcccttacgaggaggcccaggccttcattgagcgctactttcagagcttccccaaggtgcgggcctggattgagaagaccctggaggagggcaggaggcgggggtacgtggagaccctcttcggccgccgccgctacgtgccagacctagaggcccgggtgaagagcgtgcgggaggcggccgagcgcatggccttcaacatgcccgtccagggcaccgccgccgacctcatgaagctggctatggtgaagctcttccccaggctggaggaaatgggggccaggatgctccttcaggtccacgacgagctggtcctcgaggccccaaaagagagggcggaggccgtggcccggctggccaaggaggtcatggagggggtgtatcccctggccgtgcccctggaggtggaggtggggataggggaggactggctctccgccaaggagtgataccaccccatgctggcccaagccagcatgggggccccggcaaaaggtttctggggaagttaccaggcatggtgggccgaaggaaacaggaaacaagggtatgagggttttttgccctaaagaaaggccagggggtcctcccgaaggaaggcttccagggggataccccctgggcccaggagtagcccctttcctccaaaggcctgggtgaaggcttttagccctttggtcctttgggaaggggcgcttttgacctccaaagccagaaggcgccttcccttcttcaagacgaagtcaacctcctggtccctttcccgccagtagtacacctcaaagcccccgtgggggccgtgggccagaaggtgggcgcccacggcggtttccacgagccgccccatgagggcggcgtccgcccacacctcctttggggaaagccccaagaccgccgtgatgagccccgtattaagggccaggagcttggggctcgaggcgcggcgccggaagggctcggcggcgtacttctgcag

SEQ ID NO: 3373 - DNA, 3026 bp, Artificial Sequence
  Description of Artificial Sequence: Synthetic DNA sequence of Thermus aquaticus DNA Polymerase A570V
atgagggggatgctgcccctctttgagcccaagggccgggtcctcctggtggacggccaccacctggcctaccgcaccttccacgccctgaagggcctcaccaccagccggggggagccggtgcaggcggtctacggcttcgccaagagcctcctcaaggccctcaaggaggacggggacgcggtgatcgtggtctttgacgccaaggccccctccttccgccacgaggcctacggggggtacaaggcgggccgggcccccacgccggaggactttccccggcaactcgccctcatcaaggagctggtggacctcctggggctggcgcgcctcgaggtcccgggctacgaggcggacgacgtcctggccagcctggccaagaaggcggaaaaggagggctacgaggtccgcatcctcaccgccgacaaagacctttaccagctcctttccgaccgcatccacgccctccaccccgaggggtacctcatcaccccggcctggctttgggaaaagtacggcctgaggcccgaccagtgggccgactaccgggccctgaccggggacgagtccgacaaccttcccggggtcaagggcatcggggagaagacggcgaggaagcttctggaggagtgggggagcctggaagccctcctcaagaacctggaccggctgaagcccgccatccgggagaagatcctggcccacatggacgatctgaagctctcctgggacctggccaaggtgcgcaccgacctgcccctggaggtggacttcgccaaaaggcgggagcccgaccgggagaggcttagggcctttctggagaggcttgagtttggcagcctcctccacgagttcggccttctggaaagccccaaggccctggaggaggccccctggcccccgccggaaggggccttcgtgggctttgtgctttcccgcaaggagcccatgtgggccgatcttctggccctggccgccgccagggggggccgggtccaccgggcccccgagccttataaagccctcagggacctgaaggaggcgcgggggcttctcgccaaagacctgagcgttctggccctgagggaaggccttggcctcccgcccggcgacgaccccatgctcctcgcctacctcctggacccttccaacaccacccccgagggggtggcccggcgctacggcggggagtggacggaggaggcgggggagcgggccgccctttccgagaggctcttcgccaacctgtgggggaggcttgagggggaggagaggctcctttggctttaccgggaggtggagaggcccctttccgctgtcctggcccacatggaggccacgggggtgcgcctggacgtggcctatctcagggccttgtccctggaggtggccgaggagatcgcccgcctcgaggccgaggtcttccgcctggccggccaccccttcaacctcaactcccgggaccagctggaaagggtcctctttgacgagctagggcttcccgccatcggcaagacggagaagaccggcaagcgctccaccagcgccgccgtcctggaggccctccgcgaggcccaccccatcgtggagaagatcctgcagtaccgggagctcaccaagctgaagagcacctacattgaccccttgccggacctcatccaccccaggacgggccgcctccacacccgcttcaaccagacggccacggtcacgggcaggctaagtagctccgatcccaacctccagaacatccccgtccgcaccccgcttgggcagaggatccgccgggccttcatcgccgaggaggggtggctattggtggccctggactatagccagatagagctcagggtgctggcccacctctccggcgacgagaacctgatccgggtcttccaggaggggcgggacatccacacggagaccgccagctggatgttcggcgtcccccgggaggccgtggaccccctgatgcgccgggcggccaagaccatcaacttcggggtcctctacggcatgtcggcccaccgcctctcccaggagctagccatcccttacgaggaggcccaggccttcattgagcgctactttcagagcttccccaaggtgcgggcctggattgagaagaccctggaggagggcaggaggcgggggtacgtggagaccctcttcggccgccgccgctacgtgccagacctagaggcccgggtgaagagcgtgcgggaggcggccgagcgcatggccttcaacatgcccgtccagggcaccgccgccgacctcatgaagctggctatggtgaagctcttccccaggctggaggaaatgggggccaggatgctccttcaggtccacgacgagctggtcctcgaggccccaaaagagagggcggaggccgtggcccggctggccaaggaggtcatggagggggtgtatcccctggccgtgcccctggaggtggaggtggggataggggaggactggctctccgccaaggagtgataccaccccatgctggcccaagccagcatgggggccccggcaaaaggtttctggggaagttaccaggcatggtgggccgaaggaaacaggaaacaagggtatgagggttttttgccctaaagaaaggccagggggtcctcccgaaggaaggcttccagggggataccccctgggcccaggagtagcccctttcctccaaaggcctgggtgaaggcttttagccctttggtcctttgggaaggggcgcttttgacctccaaagccagaaggcgccttcccttcttcaagacgaagtcaacctcctggtccctttcccgccagtagtacacctcaaagcccccgtgggggccgtgggccagaaggtgggcgcccacggcggtttccacgagccgccccatgagggcggcgtccgcccacacctcctttggggaaagccccaagaccgccgtgatgagccccgtattaagggccaggagcttggggctcgaggcgcggcgccggaagggctcggcggcgtacttctgcag

SEQ ID NO: 3374 - DNA, 3026 bp, Artificial Sequence
  Description of Artificial Sequence: Synthetic DNA sequence of Thermus aquaticus DNA Polymerase S577A
atgagggggatgctgcccctctttgagcccaagggccgggtcctcctggtggacggccaccacctggcctaccgcaccttccacgccctgaagggcctcaccaccagccggggggagccggtgcaggcggtctacggcttcgccaagagcctcctcaaggccctcaaggaggacggggacgcggtgatcgtggtctttgacgccaaggccccctccttccgccacgaggcctacggggggtacaaggcgggccgggcccccacgccggaggactttccccggcaactcgccctcatcaaggagctggtggacctcctggggctggcgcgcctcgaggtcccgggctacgaggcggacgacgtcctggccagcctggccaagaaggcggaaaaggagggctacgaggtccgcatcctcaccgccgacaaagacctttaccagctcctttccgaccgcatccacgccctccaccccgaggggtacctcatcaccccggcctggctttgggaaaagtacggcctgaggcccgaccagtgggccgactaccgggccctgaccggggacgagtccgacaaccttcccggggtcaagggcatcggggagaagacggcgaggaagcttctggaggagtgggggagcctggaagccctcctcaagaacctggaccggctgaagcccgccatccgggagaagatcctggcccacatggacgatctgaagctctcctgggacctggccaaggtgcgcaccgacctgcccctggaggtggacttcgccaaaaggcgggagcccgaccgggagaggcttagggcctttctggagaggcttgagtttggcagcctcctccacgagttcggccttctggaaagccccaaggccctggaggaggccccctggcccccgccggaaggggccttcgtgggctttgtgctttcccgcaaggagcccatgtgggccgatcttctggccctggccgccgccagggggggccgggtccaccgggcccccgagccttataaagccctcagggacctgaaggaggcgcgggggcttctcgccaaagacctgagcgttctggccctgagggaaggccttggcctcccgcccggcgacgaccccatgctcctcgcctacctcctggacccttccaacaccacccccgagggggtggcccggcgctacggcggggagtggacggaggaggcgggggagcgggccgccctttccgagaggctcttcgccaacctgtgggggaggcttgagggggaggagaggctcctttggctttaccgggaggtggagaggcccctttccgctgtcctggcccacatggaggccacgggggtgcgcctggacgtggcctatctcagggccttgtccctggaggtggccgaggagatcgcccgcctcgaggccgaggtcttccgcctggccggccaccccttcaacctcaactcccgggaccagctggaaagggtcctctttgacgagctagggcttcccgccatcggcaagacggagaagaccggcaagcgctccaccagcgccgccgtcctggaggccctccgcgaggcccaccccatcgtggagaagatcctgcagtaccgggagctcaccaagctgaagagcacctacattgaccccttgccggacctcatccaccccaggacgggccgcctccacacccgcttcaaccagacggccacggccacgggcaggctaagtagcgctgatcccaacctccagaacatccccgtccgcaccccgcttgggcagaggatccgccgggccttcatcgccgaggaggggtggctattggtggccctggactatagccagatagagctcagggtgctggcccacctctccggcgacgagaacctgatccgggtcttccaggaggggcgggacatccacacggagaccgccagctggatgttcggcgtcccccgggaggccgtggaccccctgatgcgccgggcggccaagaccatcaacttcggggtcctctacggcatgtcggcccaccgcctctcccaggagctagccatcccttacgaggaggcccaggccttcattgagcgctactttcagagcttccccaaggtgcgggcctggattgagaagaccctggaggagggcaggaggcgggggtacgtggagaccctcttcggccgccgccgctacgtgccagacctagaggcccgggtgaagagcgtgcgggaggcggccgagcgcatggccttcaacatgcccgtccagggcaccgccgccgacctcatgaagctggctatggtgaagctcttccccaggctggaggaaatgggggccaggatgctccttcaggtccacgacgagctggtcctcgaggccccaaaagagagggcggaggccgtggcccggctggccaaggaggtcatggagggggtgtatcccctggccgtgcccctggaggtggaggtggggataggggaggactggctctccgccaaggagtgataccaccccatgctggcccaagccagcatgggggccccggcaaaaggtttctggggaagttaccaggcatggtgggccgaaggaaacaggaaacaagggtatgagggttttttgccctaaagaaaggccagggggtcctcccgaaggaaggcttccagggggataccccctgggcccaggagtagcccctttcctccaaaggcctgggtgaaggcttttagccctttggtcctttgggaaggggcgcttttgacctccaaagccagaaggcgccttcccttcttcaagacgaagtcaacctcctggtccctttcccgccagtagtacacctcaaagcccccgtgggggccgtgggccagaaggtgggcgcccacggcggtttccacgagccgccccatgagggcggcgtccgcccacacctcctttggggaaagccccaagaccgccgtgatgagccccgtattaagggccaggagcttggggctcgaggcgcggcgccggaagggctcggcggcgtacttctgcag

SEQ ID NO: 3375 - DNA, 3026 bp, Artificial Sequence
  Description of Artificial Sequence: Synthetic DNA sequence of Thermus aquaticus DNA Polymerase S577R
atgagggggatgctgcccctctttgagcccaagggccgggtcctcctggtggacggccaccacctggcctaccgcaccttccacgccctgaagggcctcaccaccagccggggggagccggtgcaggcggtctacggcttcgccaagagcctcctcaaggccctcaaggaggacggggacgcggtgatcgtggtctttgacgccaaggccccctccttccgccacgaggcctacggggggtacaaggcgggccgggcccccacgccggaggactttccccggcaactcgccctcatcaaggagctggtggacctcctggggctggcgcgcctcgaggtcccgggctacgaggcggacgacgtcctggccagcctggccaagaaggcggaaaaggagggctacgaggtccgcatcctcaccgccgacaaagacctttaccagctcctttccgaccgcatccacgccctccaccccgaggggtacctcatcaccccggcctggctttgggaaaagtacggcctgaggcccgaccagtgggccgactaccgggccctgaccggggacgagtccgacaaccttcccggggtcaagggcatcggggagaagacggcgaggaagcttctggaggagtgggggagcctggaagccctcctcaagaacctggaccggctgaagcccgccatccgggagaagatcctggcccacatggacgatctgaagctctcctgggacctggccaaggtgcgcaccgacctgcccctggaggtggacttcgccaaaaggcgggagcccgaccgggagaggcttagggcctttctggagaggcttgagtttggcagcctcctccacgagttcggccttctggaaagccccaaggccctggaggaggccccctggcccccgccggaaggggccttcgtgggctttgtgctttcccgcaaggagcccatgtgggccgatcttctggccctggccgccgccagggggggccgggtccaccgggcccccgagccttataaagccctcagggacctgaaggaggcgcgggggcttctcgccaaagacctgagcgttctggccctgagggaaggccttggcctcccgcccggcgacgaccccatgctcctcgcctacctcctggacccttccaacaccacccccgagggggtggcccggcgctacggcggggagtggacggaggaggcgggggagcgggccgccctttccgagaggctcttcgccaacctgtgggggaggcttgagggggaggagaggctcctttggctttaccgggaggtggagaggcccctttccgctgtcctggcccacatggaggccacgggggtgcgcctggacgtggcctatctcagggccttgtccctggaggtggccgaggagatcgcccgcctcgaggccgaggtcttccgcctggccggccaccccttcaacctcaactcccgggaccagctggaaagggtcctctttgacgagctagggcttcccgccatcggcaagacggagaagaccggcaagcgctccaccagcgccgccgtcctggaggccctccgcgaggcccaccccatcgtggagaagatcctgcagtaccgggagctcaccaagctgaagagcacctacattgaccccttgccggacctcatccaccccaggacgggccgcctccacacccgcttcaaccagacggccacggccacgggcaggctaagtagccgagatcccaacctccagaacatccccgtccgcaccccgcttgggcagaggatccgccgggccttcatcgccgaggaggggtggctattggtggccctggactatagccagatagagctcagggtgctggcccacctctccggcgacgagaacctgatccgggtcttccaggaggggcgggacatccacacggagaccgccagctggatgttcggcgtcccccgggaggccgtggaccccctgatgcgccgggcggccaagaccatcaacttcggggtcctctacggcatgtcggcccaccgcctctcccaggagctagccatcccttacgaggaggcccaggccttcattgagcgctactttcagagcttccccaaggtgcgggcctggattgagaagaccctggaggagggcaggaggcgggggtacgtggagaccctcttcggccgccgccgctacgtgccagacctagaggcccgggtgaagagcgtgcgggaggcggccgagcgcatggccttcaacatgcccgtccagggcaccgccgccgacctcatgaagctggctatggtgaagctcttccccaggctggaggaaatgggggccaggatgctccttcaggtccacgacgagctggtcctcgaggccccaaaagagagggcggaggccgtggcccggctggccaaggaggtcatggagggggtgtatcccctggccgtgcccctggaggtggaggtggggataggggaggactggctctccgccaaggagtgataccaccccatgctggcccaagccagcatgggggccccggcaaaaggtttctggggaagttaccaggcatggtgggccgaaggaaacaggaaacaagggtatgagggttttttgccctaaagaaaggccagggggtcctcccgaaggaaggcttccagggggataccccctgggcccaggagtagcccctttcctccaaaggcctgggtgaaggcttttagccctttggtcctttgggaaggggcgcttttgacctccaaagccagaaggcgccttcccttcttcaagacgaagtcaacctcctggtccctttcccgccagtagtacacctcaaagcccccgtgggggccgtgggccagaaggtgggcgcccacggcggtttccacgagccgccccatgagggcggcgtccgcccacacctcctttggggaaagccccaagaccgccgtgatgagccccgtattaagggccaggagcttggggctcgaggcgcggcgccggaagggctcggcggcgtacttctgcag

SEQ ID NO: 3376 - DNA, 3026 bp, Artificial Sequence
  Description of Artificial Sequence: Synthetic DNA sequence of Thermus aquaticus DNA Polymerase S577C
atgagggggatgctgcccctctttgagcccaagggccgggtcctcctggtggacggccaccacctggcctaccgcaccttccacgccctgaagggcctcaccaccagccggggggagccggtgcaggcggtctacggcttcgccaagagcctcctcaaggccctcaaggaggacggggacgcggtgatcgtggtctttgacgccaaggccccctccttccgccacgaggcctacggggggtacaaggcgggccgggcccccacgccggaggactttccccggcaactcgccctcatcaaggagctggtggacctcctggggctggcgcgcctcgaggtcccgggctacgaggcggacgacgtcctggccagcctggccaagaaggcggaaaaggagggctacgaggtccgcatcctcaccgccgacaaagacctttaccagctcctttccgaccgcatccacgccctccaccccgaggggtacctcatcaccccggcctggctttgggaaaagtacggcctgaggcccgaccagtgggccgactaccgggccctgaccggggacgagtccgacaaccttcccggggtcaagggcatcggggagaagacggcgaggaagcttctggaggagtgggggagcctggaagccctcctcaagaacctggaccggctgaagcccgccatccgggagaagatcctggcccacatggacgatctgaagctctcctgggacctggccaaggtgcgcaccgacctgcccctggaggtggacttcgccaaaaggcgggagcccgaccgggagaggcttagggcctttctggagaggcttgagtttggcagcctcctccacgagttcggccttctggaaagccccaaggccctggaggaggccccctggcccccgccggaaggggccttcgtgggctttgtgctttcccgcaaggagcccatgtgggccgatcttctggccctggccgccgccagggggggccgggtccaccgggcccccgagccttataaagccctcagggacctgaaggaggcgcgggggcttctcgccaaagacctgagcgttctggccctgagggaaggccttggcctcccgcccggcgacgaccccatgctcctcgcctacctcctggacccttccaacaccacccccgagggggtggcccggcgctacggcggggagtggacggaggaggcgggggagcgggccgccctttccgagaggctcttcgccaacctgtgggggaggcttgagggggaggagaggctcctttggctttaccgggaggtggagaggcccctttccgctgtcctggcccacatggaggccacgggggtgcgcctggacgtggcctatctcagggccttgtccctggaggtggccgaggagatcgcccgcctcgaggccgaggtcttccgcctggccggccaccccttcaacctcaactcccgggaccagctggaaagggtcctctttgacgagctagggcttcccgccatcggcaagacggagaagaccggcaagcgctccaccagcgccgccgtcctggaggccctccgcgaggcccaccccatcgtggagaagatcctgcagtaccgggagctcaccaagctgaagagcacctacattgaccccttgccggacctcatccaccccaggacgggccgcctccacacccgcttcaaccagacggccacggccacgggcaggctaagtagctgtgatcccaacctccagaacatccccgtccgcaccccgcttgggcagaggatccgccgggccttcatcgccgaggaggggtggctattggtggccctggactatagccagatagagctcagggtgctggcccacctctccggcgacgagaacctgatccgggtcttccaggaggggcgggacatccacacggagaccgccagctggatgttcggcgtcccccgggaggccgtggaccccctgatgcgccgggcggccaagaccatcaacttcggggtcctctacggcatgtcggcccaccgcctctcccaggagctagccatcccttacgaggaggcccaggccttcattgagcgctactttcagagcttccccaaggtgcgggcctggattgagaagaccctggaggagggcaggaggcgggggtacgtggagaccctcttcggccgccgccgctacgtgccagacctagaggcccgggtgaagagcgtgcgggaggcggccgagcgcatggccttcaacatgcccgtccagggcaccgccgccgacctcatgaagctggctatggtgaagctcttccccaggctggaggaaatgggggccaggatgctccttcaggtccacgacgagctggtcctcgaggccccaaaagagagggcggaggccgtggcccggctggccaaggaggtcatggagggggtgtatcccctggccgtgcccctggaggtggaggtggggataggggaggactggctctccgccaaggagtgataccaccccatgctggcccaagccagcatgggggccccggcaaaaggtttctggggaagttaccaggcatggtgggccgaaggaaacaggaaacaagggtatgagggttttttgccctaaagaaaggccagggggtcctcccgaaggaaggcttccagggggataccccctgggcccaggagtagcccctttcctccaaaggcctgggtgaaggcttttagccctttggtcctttgggaaggggcgcttttgacctccaaagccagaaggcgccttcccttcttcaagacgaagtcaacctcctggtccctttcccgccagtagtacacctcaaagcccccgtgggggccgtgggccagaaggtgggcgcccacggcggtttccacgagccgccccatgagggcggcgtccgcccacacctcctttggggaaagccccaagaccgccgtgatgagccccgtattaagggccaggagcttggggctcgaggcgcggcgccggaagggctcggcggcgtacttctgcag

SEQ ID NO: 3377 - DNA, 3026 bp, Artificial Sequence
  Description of Artificial Sequence: Synthetic DNA sequence of Thermus aquaticus DNA Polymerase S577G
atgagggggatgctgcccctctttgagcccaagggccgggtcctcctggtggacggccaccacctggcctaccgcaccttccacgccctgaagggcctcaccaccagccggggggagccggtgcaggcggtctacggcttcgccaagagcctcctcaaggccctcaaggaggacggggacgcggtgatcgtggtctttgacgccaaggccccctccttccgccacgaggcctacggggggtacaaggcgggccgggcccccacgccggaggactttccccggcaactcgccctcatcaaggagctggtggacctcctggggctggcgcgcctcgaggtcccgggctacgaggcggacgacgtcctggccagcctggccaagaaggcggaaaaggagggctacgaggtccgcatcctcaccgccgacaaagacctttaccagctcctttccgaccgcatccacgccctccaccccgaggggtacctcatcaccccggcctggctttgggaaaagtacggcctgaggcccgaccagtgggccgactaccgggccctgaccggggacgagtccgacaaccttcccggggtcaagggcatcggggagaagacggcgaggaagcttctggaggagtgggggagcctggaagccctcctcaagaacctggaccggctgaagcccgccatccgggagaagatcctggcccacatggacgatctgaagctctcctgggacctggccaaggtgcgcaccgacctgcccctggaggtggacttcgccaaaaggcgggagcccgaccgggagaggcttagggcctttctggagaggcttgagtttggcagcctcctccacgagttcggccttctggaaagccccaaggccctggaggaggccccctggcccccgccggaaggggccttcgtgggctttgtgctttcccgcaaggagcccatgtgggccgatcttctggccctggccgccgccagggggggccgggtccaccgggcccccgagccttataaagccctcagggacctgaaggaggcgcgggggcttctcgccaaagacctgagcgttctggccctgagggaaggccttggcctcccgcccggcgacgaccccatgctcctcgcctacctcctggacccttccaacaccacccccgagggggtggcccggcgctacggcggggagtggacggaggaggcgggggagcgggccgccctttccgagaggctcttcgccaacctgtgggggaggcttgagggggaggagaggctcctttggctttaccgggaggtggagaggcccctttccgctgtcctggcccacatggaggccacgggggtgcgcctggacgtggcctatctcagggccttgtccctggaggtggccgaggagatcgcccgcctcgaggccgaggtcttccgcctggccggccaccccttcaacctcaactcccgggaccagctggaaagggtcctctttgacgagctagggcttcccgccatcggcaagacggagaagaccggcaagcgctccaccagcgccgccgtcctggaggccctccgcgaggcccaccccatcgtggagaagatcctgcagtaccgggagctcaccaagctgaagagcacctacattgaccccttgccggacctcatccaccccaggacgggccgcctccacacccgcttcaaccagacggccacggccacgggcaggctaagtagcggtgatcccaacctccagaacatccccgtccgcaccccgcttgggcagaggatccgccgggccttcatcgccgaggaggggtggctattggtggccctggactatagccagatagagctcagggtgctggcccacctctccggcgacgagaacctgatccgggtcttccaggaggggcgggacatccacacggagaccgccagctggatgttcggcgtcccccgggaggccgtggaccccctgatgcgccgggcggccaagaccatcaacttcggggtcctctacggcatgtcggcccaccgcctctcccaggagctagccatcccttacgaggaggcccaggccttcattgagcgctactttcagagcttccccaaggtgcgggcctggattgagaagaccctggaggagggcaggaggcgggggtacgtggagaccctcttcggccgccgccgctacgtgccagacctagaggcccgggtgaagagcgtgcgggaggcggccgagcgcatggccttcaacatgcccgtccagggcaccgccgccgacctcatgaagctggctatggtgaagctcttccccaggctggaggaaatgggggccaggatgctccttcaggtccacgacgagctggtcctcgaggccccaaaagagagggcggaggccgtggcccggctggccaaggaggtcatggagggggtgtatcccctggccgtgcccctggaggtggaggtggggataggggaggactggctctccgccaaggagtgataccaccccatgctggcccaagccagcatgggggccccggcaaaaggtttctggggaagttaccaggcatggtgggccgaaggaaacaggaaacaagggtatgagggttttttgccctaaagaaaggccagggggtcctcccgaaggaaggcttccagggggataccccctgggcccaggagtagcccctttcctccaaaggcctgggtgaaggcttttagccctttggtcctttgggaaggggcgcttttgacctccaaagccagaaggcgccttcccttcttcaagacgaagtcaacctcctggtccctttcccgccagtagtacacctcaaagcccccgtgggggccgtgggccagaaggtgggcgcccacggcggtttccacgagccgccccatgagggcggcgtccgcccacacctcctttggggaaagccccaagaccgccgtgatgagccccgtattaagggccaggagcttggggctcgaggcgcggcgccggaagggctcggcggcgtacttctgcag

SEQ ID NO: 3378 - DNA, 3026 bp, Artificial Sequence
  Description of Artificial Sequence: Synthetic DNA sequence of Thermus aquaticus DNA Polymerase S577Q
atgagggggatgctgcccctctttgagcccaagggccgggtcctcctggtggacggccaccacctggcctaccgcaccttccacgccctgaagggcctcaccaccagccggggggagccggtgcaggcggtctacggcttcgccaagagcctcctcaaggccctcaaggaggacggggacgcggtgatcgtggtctttgacgccaaggccccctccttccgccacgaggcctacggggggtacaaggcgggccgggcccccacgccggaggactttccccggcaactcgccctcatcaaggagctggtggacctcctggggctggcgcgcctcgaggtcccgggctacgaggcggacgacgtcctggccagcctggccaagaaggcggaaaaggagggctacgaggtccgcatcctcaccgccgacaaagacctttaccagctcctttccgaccgcatccacgccctccaccccgaggggtacctcatcaccccggcctggctttgggaaaagtacggcctgaggcccgaccagtgggccgactaccgggccctgaccggggacgagtccgacaaccttcccggggtcaagggcatcggggagaagacggcgaggaagcttctggaggagtgggggagcctggaagccctcctcaagaacctggaccggctgaagcccgccatccgggagaagatcctggcccacatggacgatctgaagctctcctgggacctggccaaggtgcgcaccgacctgcccctggaggtggacttcgccaaaaggcgggagcccgaccgggagaggcttagggcctttctggagaggcttgagtttggcagcctcctccacgagttcggccttctggaaagccccaaggccctggaggaggccccctggcccccgccggaaggggccttcgtgggctttgtgctttcccgcaaggagcccatgtgggccgatcttctggccctggccgccgccagggggggccgggtccaccgggcccccgagccttataaagccctcagggacctgaaggaggcgcgggggcttctcgccaaagacctgagcgttctggccctgagggaaggccttggcctcccgcccggcgacgaccccatgctcctcgcctacctcctggacccttccaacaccacccccgagggggtggcccggcgctacggcggggagtggacggaggaggcgggggagcgggccgccctttccgagaggctcttcgccaacctgtgggggaggcttgagggggaggagaggctcctttggctttaccgggaggtggagaggcccctttccgctgtcctggcccacatggaggccacgggggtgcgcctggacgtggcctatctcagggccttgtccctggaggtggccgaggagatcgcccgcctcgaggccgaggtcttccgcctggccggccaccccttcaacctcaactcccgggaccagctggaaagggtcctctttgacgagctagggcttcccgccatcggcaagacggagaagaccggcaagcgctccaccagcgccgccgtcctggaggccctccgcgaggcccaccccatcgtggagaagatcctgcagtaccgggagctcaccaagctgaagagcacctacattgaccccttgccggacctcatccaccccaggacgggccgcctccacacccgcttcaaccagacggccacggccacgggcaggctaagtagccaagatcccaacctccagaacatccccgtccgcaccccgcttgggcagaggatccgccgggccttcatcgccgaggaggggtggctattggtggccctggactatagccagatagagctcagggtgctggcccacctctccggcgacgagaacctgatccgggtcttccaggaggggcgggacatccacacggagaccgccagctggatgttcggcgtcccccgggaggccgtggaccccctgatgcgccgggcggccaagaccatcaacttcggggtcctctacggcatgtcggcccaccgcctctcccaggagctagccatcccttacgaggaggcccaggccttcattgagcgctactttcagagcttccccaaggtgcgggcctggattgagaagaccctggaggagggcaggaggcgggggtacgtggagaccctcttcggccgccgccgctacgtgccagacctagaggcccgggtgaagagcgtgcgggaggcggccgagcgcatggccttcaacatgcccgtccagggcaccgccgccgacctcatgaagctggctatggtgaagctcttccccaggctggaggaaatgggggccaggatgctccttcaggtccacgacgagctggtcctcgaggccccaaaagagagggcggaggccgtggcccggctggccaaggaggtcatggagggggtgtatcccctggccgtgcccctggaggtggaggtggggataggggaggactggctctccgccaaggagtgataccaccccatgctggcccaagccagcatgggggccccggcaaaaggtttctggggaagttaccaggcatggtgggccgaaggaaacaggaaacaagggtatgagggttttttgccctaaagaaaggccagggggtcctcccgaaggaaggcttccagggggataccccctgggcccaggagtagcccctttcctccaaaggcctgggtgaaggcttttagccctttggtcctttgggaaggggcgcttttgacctccaaagccagaaggcgccttcccttcttcaagacgaagtcaacctcctggtccctttcccgccagtagtacacctcaaagcccccgtgggggccgtgggccagaaggtgggcgcccacggcggtttccacgagccgccccatgagggcggcgtccgcccacacctcctttggggaaagccccaagaccgccgtgatgagccccgtattaagggccaggagcttggggctcgaggcgcggcgccggaagggctcggcggcgtacttctgcag

SEQ ID NO: 3379 - DNA, 3026 bp, Artificial Sequence
  Description of Artificial Sequence: Synthetic DNA sequence of Thermus aquaticus DNA Polymerase S577H
atgagggggatgctgcccctctttgagcccaagggccgggtcctcctggtggacggccaccacctggcctaccgcaccttccacgccctgaagggcctcaccaccagccggggggagccggtgcaggcggtctacggcttcgccaagagcctcctcaaggccctcaaggaggacggggacgcggtgatcgtggtctttgacgccaaggccccctccttccgccacgaggcctacggggggtacaaggcgggccgggcccccacgccggaggactttccccggcaactcgccctcatcaaggagctggtggacctcctggggctggcgcgcctcgaggtcccgggctacgaggcggacgacgtcctggccagcctggccaagaaggcggaaaaggagggctacgaggtccgcatcctcaccgccgacaaagacctttaccagctcctttccgaccgcatccacgccctccaccccgaggggtacctcatcaccccggcctggctttgggaaaagtacggcctgaggcccgaccagtgggccgactaccgggccctgaccggggacgagtccgacaaccttcccggggtcaagggcatcggggagaagacggcgaggaagcttctggaggagtgggggagcctggaagccctcctcaagaacctggaccggctgaagcccgccatccgggagaagatcctggcccacatggacgatctgaagctctcctgggacctggccaaggtgcgcaccgacctgcccctggaggtggacttcgccaaaaggcgggagcccgaccgggagaggcttagggcctttctggagaggcttgagtttggcagcctcctccacgagttcggccttctggaaagccccaaggccctggaggaggccccctggcccccgccggaaggggccttcgtgggctttgtgctttcccgcaaggagcccatgtgggccgatcttctggccctggccgccgccagggggggccgggtccaccgggcccccgagccttataaagccctcagggacctgaaggaggcgcgggggcttctcgccaaagacctgagcgttctggccctgagggaaggccttggcctcccgcccggcgacgaccccatgctcctcgcctacctcctggacccttccaacaccacccccgagggggtggcccggcgctacggcggggagtggacggaggaggcgggggagcgggccgccctttccgagaggctcttcgccaacctgtgggggaggcttgagggggaggagaggctcctttggctttaccgggaggtggagaggcccctttccgctgtcctggcccacatggaggccacgggggtgcgcctggacgtggcctatctcagggccttgtccctggaggtggccgaggagatcgcccgcctcgaggccgaggtcttccgcctggccggccaccccttcaacctcaactcccgggaccagctggaaagggtcctctttgacgagctagggcttcccgccatcggcaagacggagaagaccggcaagcgctccaccagcgccgccgtcctggaggccctccgcgaggcccaccccatcgtggagaagatcctgcagtaccgggagctcaccaagctgaagagcacctacattgaccccttgccggacctcatccaccccaggacgggccgcctccacacccgcttcaaccagacggccacggccacgggcaggctaagtagccatgatcccaacctccagaacatccccgtccgcaccccgcttgggcagaggatccgccgggccttcatcgccgaggaggggtggctattggtggccctggactatagccagatagagctcagggtgctggcccacctctccggcgacgagaacctgatccgggtcttccaggaggggcgggacatccacacggagaccgccagctggatgttcggcgtcccccgggaggccgtggaccccctgatgcgccgggcggccaagaccatcaacttcggggtcctctacggcatgtcggcccaccgcctctcccaggagctagccatcccttacgaggaggcccaggccttcattgagcgctactttcagagcttccccaaggtgcgggcctggattgagaagaccctggaggagggcaggaggcgggggtacgtggagaccctcttcggccgccgccgctacgtgccagacctagaggcccgggtgaagagcgtgcgggaggcggccgagcgcatggccttcaacatgcccgtccagggcaccgccgccgacctcatgaagctggctatggtgaagctcttccccaggctggaggaaatgggggccaggatgctccttcaggtccacgacgagctggtcctcgaggccccaaaagagagggcggaggccgtggcccggctggccaaggaggtcatggagggggtgtatcccctggccgtgcccctggaggtggaggtggggataggggaggactggctctccgccaaggagtgataccaccccatgctggcccaagccagcatgggggccccggcaaaaggtttctggggaagttaccaggcatggtgggccgaaggaaacaggaaacaagggtatgagggttttttgccctaaagaaaggccagggggtcctcccgaaggaaggcttccagggggataccccctgggcccaggagtagcccctttcctccaaaggcctgggtgaaggcttttagccctttggtcctttgggaaggggcgcttttgacctccaaagccagaaggcgccttcccttcttcaagacgaagtcaacctcctggtccctttcccgccagtagtacacctcaaagcccccgtgggggccgtgggccagaaggtgggcgcccacggcggtttccacgagccgccccatgagggcggcgtccgcccacacctcctttggggaaagccccaagaccgccgtgatgagccccgtattaagggccaggagcttggggctcgaggcgcggcgccggaagggctcggcggcgtacttctgcag

SEQ ID NO: 3380 - DNA, 3026 bp, Artificial Sequence
  Description of Artificial Sequence: Synthetic DNA sequence of Thermus aquaticus DNA Polymerase S577I
atgagggggatgctgcccctctttgagcccaagggccgggtcctcctggtggacggccaccacctggcctaccgcaccttccacgccctgaagggcctcaccaccagccggggggagccggtgcaggcggtctacggcttcgccaagagcctcctcaaggccctcaaggaggacggggacgcggtgatcgtggtctttgacgccaaggccccctccttccgccacgaggcctacggggggtacaaggcgggccgggcccccacgccggaggactttccccggcaactcgccctcatcaaggagctggtggacctcctggggctggcgcgcctcgaggtcccgggctacgaggcggacgacgtcctggccagcctggccaagaaggcggaaaaggagggctacgaggtccgcatcctcaccgccgacaaagacctttaccagctcctttccgaccgcatccacgccctccaccccgaggggtacctcatcaccccggcctggctttgggaaaagtacggcctgaggcccgaccagtgggccgactaccgggccctgaccggggacgagtccgacaaccttcccggggtcaagggcatcggggagaagacggcgaggaagcttctggaggagtgggggagcctggaagccctcctcaagaacctggaccggctgaagcccgccatccgggagaagatcctggcccacatggacgatctgaagctctcctgggacctggccaaggtgcgcaccgacctgcccctggaggtggacttcgccaaaaggcgggagcccgaccgggagaggcttagggcctttctggagaggcttgagtttggcagcctcctccacgagttcggccttctggaaagccccaaggccctggaggaggccccctggcccccgccggaaggggccttcgtgggctttgtgctttcccgcaaggagcccatgtgggccgatcttctggccctggccgccgccagggggggccgggtccaccgggcccccgagccttataaagccctcagggacctgaaggaggcgcgggggcttctcgccaaagacctgagcgttctggccctgagggaaggccttggcctcccgcccggcgacgaccccatgctcctcgcctacctcctggacccttccaacaccacccccgagggggtggcccggcgctacggcggggagtggacggaggaggcgggggagcgggccgccctttccgagaggctcttcgccaacctgtgggggaggcttgagggggaggagaggctcctttggctttaccgggaggtggagaggcccctttccgctgtcctggcccacatggaggccacgggggtgcgcctggacgtggcctatctcagggccttgtccctggaggtggccgaggagatcgcccgcctcgaggccgaggtcttccgcctggccggccaccccttcaacctcaactcccgggaccagctggaaagggtcctctttgacgagctagggcttcccgccatcggcaagacggagaagaccggcaagcgctccaccagcgccgccgtcctggaggccctccgcgaggcccaccccatcgtggagaagatcctgcagtaccgggagctcaccaagctgaagagcacctacattgaccccttgccggacctcatccaccccaggacgggccgcctccacacccgcttcaaccagacggccacggccacgggcaggctaagtagcattgatcccaacctccagaacatccccgtccgcaccccgcttgggcagaggatccgccgggccttcatcgccgaggaggggtggctattggtggccctggactatagccagatagagctcagggtgctggcccacctctccggcgacgagaacctgatccgggtcttccaggaggggcgggacatccacacggagaccgccagctggatgttcggcgtcccccgggaggccgtggaccccctgatgcgccgggcggccaagaccatcaacttcggggtcctctacggcatgtcggcccaccgcctctcccaggagctagccatcccttacgaggaggcccaggccttcattgagcgctactttcagagcttccccaaggtgcgggcctggattgagaagaccctggaggagggcaggaggcgggggtacgtggagaccctcttcggccgccgccgctacgtgccagacctagaggcccgggtgaagagcgtgcgggaggcggccgagcgcatggccttcaacatgcccgtccagggcaccgccgccgacctcatgaagctggctatggtgaagctcttccccaggctggaggaaatgggggccaggatgctccttcaggtccacgacgagctggtcctcgaggccccaaaagagagggcggaggccgtggcccggctggccaaggaggtcatggagggggtgtatcccctggccgtgcccctggaggtggaggtggggataggggaggactggctctccgccaaggagtgataccaccccatgctggcccaagccagcatgggggccccggcaaaaggtttctggggaagttaccaggcatggtgggccgaaggaaacaggaaacaagggtatgagggttttttgccctaaagaaaggccagggggtcctcccgaaggaaggcttccagggggataccccctgggcccaggagtagcccctttcctccaaaggcctgggtgaaggcttttagccctttggtcctttgggaaggggcgcttttgacctccaaagccagaaggcgccttcccttcttcaagacgaagtcaacctcctggtccctttcccgccagtagtacacctcaaagcccccgtgggggccgtgggccagaaggtgggcgcccacggcggtttccacgagccgccccatgagggcggcgtccgcccacacctcctttggggaaagccccaagaccgccgtgatgagccccgtattaagggccaggagcttggggctcgaggcgcggcgccggaagggctcggcggcgtacttctgcag

SEQ ID NO: 3381 - DNA, 3026 bp, Artificial Sequence
  Description of Artificial Sequence: Synthetic DNA sequence of Thermus aquaticus DNA Polymerase S577L
atgagggggatgctgcccctctttgagcccaagggccgggtcctcctggtggacggccaccacctggcctaccgcaccttccacgccctgaagggcctcaccaccagccggggggagccggtgcaggcggtctacggcttcgccaagagcctcctcaaggccctcaaggaggacggggacgcggtgatcgtggtctttgacgccaaggccccctccttccgccacgaggcctacggggggtacaaggcgggccgggcccccacgccggaggactttccccggcaactcgccctcatcaaggagctggtggacctcctggggctggcgcgcctcgaggtcccgggctacgaggcggacgacgtcctggccagcctggccaagaaggcggaaaaggagggctacgaggtccgcatcctcaccgccgacaaagacctttaccagctcctttccgaccgcatccacgccctccaccccgaggggtacctcatcaccccggcctggctttgggaaaagtacggcctgaggcccgaccagtgggccgactaccgggccctgaccggggacgagtccgacaaccttcccggggtcaagggcatcggggagaagacggcgaggaagcttctggaggagtgggggagcctggaagccctcctcaagaacctggaccggctgaagcccgccatccgggagaagatcctggcccacatggacgatctgaagctctcctgggacctggccaaggtgcgcaccgacctgcccctggaggtggacttcgccaaaaggcgggagcccgaccgggagaggcttagggcctttctggagaggcttgagtttggcagcctcctccacgagttcggccttctggaaagccccaaggccctggaggaggccccctggcccccgccggaaggggccttcgtgggctttgtgctttcccgcaaggagcccatgtgggccgatcttctggccctggccgccgccagggggggccgggtccaccgggcccccgagccttataaagccctcagggacctgaaggaggcgcgggggcttctcgccaaagacctgagcgttctggccctgagggaaggccttggcctcccgcccggcgacgaccccatgctcctcgcctacctcctggacccttccaacaccacccccgagggggtggcccggcgctacggcggggagtggacggaggaggcgggggagcgggccgccctttccgagaggctcttcgccaacctgtgggggaggcttgagggggaggagaggctcctttggctttaccgggaggtggagaggcccctttccgctgtcctggcccacatggaggccacgggggtgcgcctggacgtggcctatctcagggccttgtccctggaggtggccgaggagatcgcccgcctcgaggccgaggtcttccgcctggccggccaccccttcaacctcaactcccgggaccagctggaaagggtcctctttgacgagctagggcttcccgccatcggcaagacggagaagaccggcaagcgctccaccagcgccgccgtcctggaggccctccgcgaggcccaccccatcgtggagaagatcctgcagtaccgggagctcaccaagctgaagagcacctacattgaccccttgccggacctcatccaccccaggacgggccgcctccacacccgcttcaaccagacggccacggccacgggcaggctaagtagcttagatcccaacctccagaacatccccgtccgcaccccgcttgggcagaggatccgccgggccttcatcgccgaggaggggtggctattggtggccctggactatagccagatagagctcagggtgctggcccacctctccggcgacgagaacctgatccgggtcttccaggaggggcgggacatccacacggagaccgccagctggatgttcggcgtcccccgggaggccgtggaccccctgatgcgccgggcggccaagaccatcaacttcggggtcctctacggcatgtcggcccaccgcctctcccaggagctagccatcccttacgaggaggcccaggccttcattgagcgctactttcagagcttccccaaggtgcgggcctggattgagaagaccctggaggagggcaggaggcgggggtacgtggagaccctcttcggccgccgccgctacgtgccagacctagaggcccgggtgaagagcgtgcgggaggcggccgagcgcatggccttcaacatgcccgtccagggcaccgccgccgacctcatgaagctggctatggtgaagctcttccccaggctggaggaaatgggggccaggatgctccttcaggtccacgacgagctggtcctcgaggccccaaaagagagggcggaggccgtggcccggctggccaaggaggtcatggagggggtgtatcccctggccgtgcccctggaggtggaggtggggataggggaggactggctctccgccaaggagtgataccaccccatgctggcccaagccagcatgggggccccggcaaaaggtttctggggaagttaccaggcatggtgggccgaaggaaacaggaaacaagggtatgagggttttttgccctaaagaaaggccagggggtcctcccgaaggaaggcttccagggggataccccctgggcccaggagtagcccctttcctccaaaggcctgggtgaaggcttttagccctttggtcctttgggaaggggcgcttttgacctccaaagccagaaggcgccttcccttcttcaagacgaagtcaacctcctggtccctttcccgccagtagtacacctcaaagcccccgtgggggccgtgggccagaaggtgggcgcccacggcggtttccacgagccgccccatgagggcggcgtccgcccacacctcctttggggaaagccccaagaccgccgtgatgagccccgtattaagggccaggagcttggggctcgaggcgcggcgccggaagggctcggcggcgtacttctgcag

SEQ ID NO: 3382 - DNA, 3026 bp, Artificial Sequence
  Description of Artificial Sequence: Synthetic DNA sequence of Thermus aquaticus DNA Polymerase S577K
atgagggggatgctgcccctctttgagcccaagggccgggtcctcctggtggacggccaccacctggcctaccgcaccttccacgccctgaagggcctcaccaccagccggggggagccggtgcaggcggtctacggcttcgccaagagcctcctcaaggccctcaaggaggacggggacgcggtgatcgtggtctttgacgccaaggccccctccttccgccacgaggcctacggggggtacaaggcgggccgggcccccacgccggaggactttccccggcaactcgccctcatcaaggagctggtggacctcctggggctggcgcgcctcgaggtcccgggctacgaggcggacgacgtcctggccagcctggccaagaaggcggaaaaggagggctacgaggtccgcatcctcaccgccgacaaagacctttaccagctcctttccgaccgcatccacgccctccaccccgaggggtacctcatcaccccggcctggctttgggaaaagtacggcctgaggcccgaccagtgggccgactaccgggccctgaccggggacgagtccgacaaccttcccggggtcaagggcatcggggagaagacggcgaggaagcttctggaggagtgggggagcctggaagccctcctcaagaacctggaccggctgaagcccgccatccgggagaagatcctggcccacatggacgatctgaagctctcctgggacctggccaaggtgcgcaccgacctgcccctggaggtggacttcgccaaaaggcgggagcccgaccgggagaggcttagggcctttctggagaggcttgagtttggcagcctcctccacgagttcggccttctggaaagccccaaggccctggaggaggccccctggcccccgccggaaggggccttcgtgggctttgtgctttcccgcaaggagcccatgtgggccgatcttctggccctggccgccgccagggggggccgggtccaccgggcccccgagccttataaagccctcagggacctgaaggaggcgcgggggcttctcgccaaagacctgagcgttctggccctgagggaaggccttggcctcccgcccggcgacgaccccatgctcctcgcctacctcctggacccttccaacaccacccccgagggggtggcccggcgctacggcggggagtggacggaggaggcgggggagcgggccgccctttccgagaggctcttcgccaacctgtgggggaggcttgagggggaggagaggctcctttggctttaccgggaggtggagaggcccctttccgctgtcctggcccacatggaggccacgggggtgcgcctggacgtggcctatctcagggccttgtccctggaggtggccgaggagatcgcccgcctcgaggccgaggtcttccgcctggccggccaccccttcaacctcaactcccgggaccagctggaaagggtcctctttgacgagctagggcttcccgccatcggcaagacggagaagaccggcaagcgctccaccagcgccgccgtcctggaggccctccgcgaggcccaccccatcgtggagaagatcctgcagtaccgggagctcaccaagctgaagagcacctacattgaccccttgccggacctcatccaccccaggacgggccgcctccacacccgcttcaaccagacggccacggccacgggcaggctaagtagcaaagatcccaacctccagaacatccccgtccgcaccccgcttgggcagaggatccgccgggccttcatcgccgaggaggggtggctattggtggccctggactatagccagatagagctcagggtgctggcccacctctccggcgacgagaacctgatccgggtcttccaggaggggcgggacatccacacggagaccgccagctggatgttcggcgtcccccgggaggccgtggaccccctgatgcgccgggcggccaagaccatcaacttcggggtcctctacggcatgtcggcccaccgcctctcccaggagctagccatcccttacgaggaggcccaggccttcattgagcgctactttcagagcttccccaaggtgcgggcctggattgagaagaccctggaggagggcaggaggcgggggtacgtggagaccctcttcggccgccgccgctacgtgccagacctagaggcccgggtgaagagcgtgcgggaggcggccgagcgcatggccttcaacatgcccgtccagggcaccgccgccgacctcatgaagctggctatggtgaagctcttccccaggctggaggaaatgggggccaggatgctccttcaggtccacgacgagctggtcctcgaggccccaaaagagagggcggaggccgtggcccggctggccaaggaggtcatggagggggtgtatcccctggccgtgcccctggaggtggaggtggggataggggaggactggctctccgccaaggagtgataccaccccatgctggcccaagccagcatgggggccccggcaaaaggtttctggggaagttaccaggcatggtgggccgaaggaaacaggaaacaagggtatgagggttttttgccctaaagaaaggccagggggtcctcccgaaggaaggcttccagggggataccccctgggcccaggagtagcccctttcctccaaaggcctgggtgaaggcttttagccctttggtcctttgggaaggggcgcttttgacctccaaagccagaaggcgccttcccttcttcaagacgaagtcaacctcctggtccctttcccgccagtagtacacctcaaagcccccgtgggggccgtgggccagaaggtgggcgcccacggcggtttccacgagccgccccatgagggcggcgtccgcccacacctcctttggggaaagccccaagaccgccgtgatgagccccgtattaagggccaggagcttggggctcgaggcgcggcgccggaagggctcggcggcgtacttctgcag

SEQ ID NO: 3383 - DNA, 3026 bp, Artificial Sequence
  Description of Artificial Sequence: Synthetic DNA sequence of Thermus aquaticus DNA Polymerase S577E
atgagggggatgctgcccctctttgagcccaagggccgggtcctcctggtggacggccaccacctggcctaccgcaccttccacgccctgaagggcctcaccaccagccggggggagccggtgcaggcggtctacggcttcgccaagagcctcctcaaggccctcaaggaggacggggacgcggtgatcgtggtctttgacgccaaggccccctccttccgccacgaggcctacggggggtacaaggcgggccgggcccccacgccggaggactttccccggcaactcgccctcatcaaggagctggtggacctcctggggctggcgcgcctcgaggtcccgggctacgaggcggacgacgtcctggccagcctggccaagaaggcggaaaaggagggctacgaggtccgcatcctcaccgccgacaaagacctttaccagctcctttccgaccgcatccacgccctccaccccgaggggtacctcatcaccccggcctggctttgggaaaagtacggcctgaggcccgaccagtgggccgactaccgggccctgaccggggacgagtccgacaaccttcccggggtcaagggcatcggggagaagacggcgaggaagcttctggaggagtgggggagcctggaagccctcctcaagaacctggaccggctgaagcccgccatccgggagaagatcctggcccacatggacgatctgaagctctcctgggacctggccaaggtgcgcaccgacctgcccctggaggtggacttcgccaaaaggcgggagcccgaccgggagaggcttagggcctttctggagaggcttgagtttggcagcctcctccacgagttcggccttctggaaagccccaaggccctggaggaggccccctggcccccgccggaaggggccttcgtgggctttgtgctttcccgcaaggagcccatgtgggccgatcttctggccctggccgccgccagggggggccgggtccaccgggcccccgagccttataaagccctcagggacctgaaggaggcgcgggggcttctcgccaaagacctgagcgttctggccctgagggaaggccttggcctcccgcccggcgacgaccccatgctcctcgcctacctcctggacccttccaacaccacccccgagggggtggcccggcgctacggcggggagtggacggaggaggcgggggagcgggccgccctttccgagaggctcttcgccaacctgtgggggaggcttgagggggaggagaggctcctttggctttaccgggaggtggagaggcccctttccgctgtcctggcccacatggaggccacgggggtgcgcctggacgtggcctatctcagggccttgtccctggaggtggccgaggagatcgcccgcctcgaggccgaggtcttccgcctggccggccaccccttcaacctcaactcccgggaccagctggaaagggtcctctttgacgagctagggcttcccgccatcggcaagacggagaagaccggcaagcgctccaccagcgccgccgtcctggaggccctccgcgaggcccaccccatcgtggagaagatcctgcagtaccgggagctcaccaagctgaagagcacctacattgaccccttgccggacctcatccaccccaggacgggccgcctccacacccgcttcaaccagacggccacggccacgggcaggctaagtagcgaagatcccaacctccagaacatccccgtccgcaccccgcttgggcagaggatccgccgggccttcatcgccgaggaggggtggctattggtggccctggactatagccagatagagctcagggtgctggcccacctctccggcgacgagaacctgatccgggtcttccaggaggggcgggacatccacacggagaccgccagctggatgttcggcgtcccccgggaggccgtggaccccctgatgcgccgggcggccaagaccatcaacttcggggtcctctacggcatgtcggcccaccgcctctcccaggagctagccatcccttacgaggaggcccaggccttcattgagcgctactttcagagcttccccaaggtgcgggcctggattgagaagaccctggaggagggcaggaggcgggggtacgtggagaccctcttcggccgccgccgctacgtgccagacctagaggcccgggtgaagagcgtgcgggaggcggccgagcgcatggccttcaacatgcccgtccagggcaccgccgccgacctcatgaagctggctatggtgaagctcttccccaggctggaggaaatgggggccaggatgctccttcaggtccacgacgagctggtcctcgaggccccaaaagagagggcggaggccgtggcccggctggccaaggaggtcatggagggggtgtatcccctggccgtgcccctggaggtggaggtggggataggggaggactggctctccgccaaggagtgataccaccccatgctggcccaagccagcatgggggccccggcaaaaggtttctggggaagttaccaggcatggtgggccgaaggaaacaggaaacaagggtatgagggttttttgccctaaagaaaggccagggggtcctcccgaaggaaggcttccagggggataccccctgggcccaggagtagcccctttcctccaaaggcctgggtgaaggcttttagccctttggtcctttgggaaggggcgcttttgacctccaaagccagaaggcgccttcccttcttcaagacgaagtcaacctcctggtccctttcccgccagtagtacacctcaaagcccccgtgggggccgtgggccagaaggtgggcgcccacggcggtttccacgagccgccccatgagggcggcgtccgcccacacctcctttggggaaagccccaagaccgccgtgatgagccccgtattaagggccaggagcttggggctcgaggcgcggcgccggaagggctcggcggcgtacttctgcag

SEQ ID NO: 3384 - DNA, 3026 bp, Artificial Sequence
  Description of Artificial Sequence: Synthetic DNA sequence of Thermus aquaticus DNA Polymerase S577D
atgagggggatgctgcccctctttgagcccaagggccgggtcctcctggtggacggccaccacctggcctaccgcaccttccacgccctgaagggcctcaccaccagccggggggagccggtgcaggcggtctacggcttcgccaagagcctcctcaaggccctcaaggaggacggggacgcggtgatcgtggtctttgacgccaaggccccctccttccgccacgaggcctacggggggtacaaggcgggccgggcccccacgccggaggactttccccggcaactcgccctcatcaaggagctggtggacctcctggggctggcgcgcctcgaggtcccgggctacgaggcggacgacgtcctggccagcctggccaagaaggcggaaaaggagggctacgaggtccgcatcctcaccgccgacaaagacctttaccagctcctttccgaccgcatccacgccctccaccccgaggggtacctcatcaccccggcctggctttgggaaaagtacggcctgaggcccgaccagtgggccgactaccgggccctgaccggggacgagtccgacaaccttcccggggtcaagggcatcggggagaagacggcgaggaagcttctggaggagtgggggagcctggaagccctcctcaagaacctggaccggctgaagcccgccatccgggagaagatcctggcccacatggacgatctgaagctctcctgggacctggccaaggtgcgcaccgacctgcccctggaggtggacttcgccaaaaggcgggagcccgaccgggagaggcttagggcctttctggagaggcttgagtttggcagcctcctccacgagttcggccttctggaaagccccaaggccctggaggaggccccctggcccccgccggaaggggccttcgtgggctttgtgctttcccgcaaggagcccatgtgggccgatcttctggccctggccgccgccagggggggccgggtccaccgggcccccgagccttataaagccctcagggacctgaaggaggcgcgggggcttctcgccaaagacctgagcgttctggccctgagggaaggccttggcctcccgcccggcgacgaccccatgctcctcgcctacctcctggacccttccaacaccacccccgagggggtggcccggcgctacggcggggagtggacggaggaggcgggggagcgggccgccctttccgagaggctcttcgccaacctgtgggggaggcttgagggggaggagaggctcctttggctttaccgggaggtggagaggcccctttccgctgtcctggcccacatggaggccacgggggtgcgcctggacgtggcctatctcagggccttgtccctggaggtggccgaggagatcgcccgcctcgaggccgaggtcttccgcctggccggccaccccttcaacctcaactcccgggaccagctggaaagggtcctctttgacgagctagggcttcccgccatcggcaagacggagaagaccggcaagcgctccaccagcgccgccgtcctggaggccctccgcgaggcccaccccatcgtggagaagatcctgcagtaccgggagctcaccaagctgaagagcacctacattgaccccttgccggacctcatccaccccaggacgggccgcctccacacccgcttcaaccagacggccacggccacgggcaggctaagtagcgatgatcccaacctccagaacatccccgtccgcaccccgcttgggcagaggatccgccgggccttcatcgccgaggaggggtggctattggtggccctggactatagccagatagagctcagggtgctggcccacctctccggcgacgagaacctgatccgggtcttccaggaggggcgggacatccacacggagaccgccagctggatgttcggcgtcccccgggaggccgtggaccccctgatgcgccgggcggccaagaccatcaacttcggggtcctctacggcatgtcggcccaccgcctctcccaggagctagccatcccttacgaggaggcccaggccttcattgagcgctactttcagagcttccccaaggtgcgggcctggattgagaagaccctggaggagggcaggaggcgggggtacgtggagaccctcttcggccgccgccgctacgtgccagacctagaggcccgggtgaagagcgtgcgggaggcggccgagcgcatggccttcaacatgcccgtccagggcaccgccgccgacctcatgaagctggctatggtgaagctcttccccaggctggaggaaatgggggccaggatgctccttcaggtccacgacgagctggtcctcgaggccccaaaagagagggcggaggccgtggcccggctggccaaggaggtcatggagggggtgtatcccctggccgtgcccctggaggtggaggtggggataggggaggactggctctccgccaaggagtgataccaccccatgctggcccaagccagcatgggggccccggcaaaaggtttctggggaagttaccaggcatggtgggccgaaggaaacaggaaacaagggtatgagggttttttgccctaaagaaaggccagggggtcctcccgaaggaaggcttccagggggataccccctgggcccaggagtagcccctttcctccaaaggcctgggtgaaggcttttagccctttggtcctttgggaaggggcgcttttgacctccaaagccagaaggcgccttcccttcttcaagacgaagtcaacctcctggtccctttcccgccagtagtacacctcaaagcccccgtgggggccgtgggccagaaggtgggcgcccacggcggtttccacgagccgccccatgagggcggcgtccgcccacacctcctttggggaaagccccaagaccgccgtgatgagccccgtattaagggccaggagcttggggctcgaggcgcggcgccggaagggctcggcggcgtacttctgcag

SEQ ID NO: 3385 - DNA, 3026 bp, Artificial Sequence
  Description of Artificial Sequence: Synthetic DNA sequence of Thermus aquaticus DNA Polymerase S577F
atgagggggatgctgcccctctttgagcccaagggccgggtcctcctggtggacggccaccacctggcctaccgcaccttccacgccctgaagggcctcaccaccagccggggggagccggtgcaggcggtctacggcttcgccaagagcctcctcaaggccctcaaggaggacggggacgcggtgatcgtggtctttgacgccaaggccccctccttccgccacgaggcctacggggggtacaaggcgggccgggcccccacgccggaggactttccccggcaactcgccctcatcaaggagctggtggacctcctggggctggcgcgcctcgaggtcccgggctacgaggcggacgacgtcctggccagcctggccaagaaggcggaaaaggagggctacgaggtccgcatcctcaccgccgacaaagacctttaccagctcctttccgaccgcatccacgccctccaccccgaggggtacctcatcaccccggcctggctttgggaaaagtacggcctgaggcccgaccagtgggccgactaccgggccctgaccggggacgagtccgacaaccttcccggggtcaagggcatcggggagaagacggcgaggaagcttctggaggagtgggggagcctggaagccctcctcaagaacctggaccggctgaagcccgccatccgggagaagatcctggcccacatggacgatctgaagctctcctgggacctggccaaggtgcgcaccgacctgcccctggaggtggacttcgccaaaaggcgggagcccgaccgggagaggcttagggcctttctggagaggcttgagtttggcagcctcctccacgagttcggccttctggaaagccccaaggccctggaggaggccccctggcccccgccggaaggggccttcgtgggctttgtgctttcccgcaaggagcccatgtgggccgatcttctggccctggccgccgccagggggggccgggtccaccgggcccccgagccttataaagccctcagggacctgaaggaggcgcgggggcttctcgccaaagacctgagcgttctggccctgagggaaggccttggcctcccgcccggcgacgaccccatgctcctcgcctacctcctggacccttccaacaccacccccgagggggtggcccggcgctacggcggggagtggacggaggaggcgggggagcgggccgccctttccgagaggctcttcgccaacctgtgggggaggcttgagggggaggagaggctcctttggctttaccgggaggtggagaggcccctttccgctgtcctggcccacatggaggccacgggggtgcgcctggacgtggcctatctcagggccttgtccctggaggtggccgaggagatcgcccgcctcgaggccgaggtcttccgcctggccggccaccccttcaacctcaactcccgggaccagctggaaagggtcctctttgacgagctagggcttcccgccatcggcaagacggagaagaccggcaagcgctccaccagcgccgccgtcctggaggccctccgcgaggcccaccccatcgtggagaagatcctgcagtaccgggagctcaccaagctgaagagcacctacattgaccccttgccggacctcatccaccccaggacgggccgcctccacacccgcttcaaccagacggccacggccacgggcaggctaagtagctttgatcccaacctccagaacatccccgtccgcaccccgcttgggcagaggatccgccgggccttcatcgccgaggaggggtggctattggtggccctggactatagccagatagagctcagggtgctggcccacctctccggcgacgagaacctgatccgggtcttccaggaggggcgggacatccacacggagaccgccagctggatgttcggcgtcccccgggaggccgtggaccccctgatgcgccgggcggccaagaccatcaacttcggggtcctctacggcatgtcggcccaccgcctctcccaggagctagccatcccttacgaggaggcccaggccttcattgagcgctactttcagagcttccccaaggtgcgggcctggattgagaagaccctggaggagggcaggaggcgggggtacgtggagaccctcttcggccgccgccgctacgtgccagacctagaggcccgggtgaagagcgtgcgggaggcggccgagcgcatggccttcaacatgcccgtccagggcaccgccgccgacctcatgaagctggctatggtgaagctcttccccaggctggaggaaatgggggccaggatgctccttcaggtccacgacgagctggtcctcgaggccccaaaagagagggcggaggccgtggcccggctggccaaggaggtcatggagggggtgtatcccctggccgtgcccctggaggtggaggtggggataggggaggactggctctccgccaaggagtgataccaccccatgctggcccaagccagcatgggggccccggcaaaaggtttctggggaagttaccaggcatggtgggccgaaggaaacaggaaacaagggtatgagggttttttgccctaaagaaaggccagggggtcctcccgaaggaaggcttccagggggataccccctgggcccaggagtagcccctttcctccaaaggcctgggtgaaggcttttagccctttggtcctttgggaaggggcgcttttgacctccaaagccagaaggcgccttcccttcttcaagacgaagtcaacctcctggtccctttcccgccagtagtacacctcaaagcccccgtgggggccgtgggccagaaggtgggcgcccacggcggtttccacgagccgccccatgagggcggcgtccgcccacacctcctttggggaaagccccaagaccgccgtgatgagccccgtattaagggccaggagcttggggctcgaggcgcggcgccggaagggctcggcggcgtacttctgcag

SEQ ID NO: 3386 - DNA, 3026 bp, Artificial Sequence
  Description of Artificial Sequence: Synthetic DNA sequence of Thermus aquaticus DNA Polymerase S577Y
atgagggggatgctgcccctctttgagcccaagggccgggtcctcctggtggacggccaccacctggcctaccgcaccttccacgccctgaagggcctcaccaccagccggggggagccggtgcaggcggtctacggcttcgccaagagcctcctcaaggccctcaaggaggacggggacgcggtgatcgtggtctttgacgccaaggccccctccttccgccacgaggcctacggggggtacaaggcgggccgggcccccacgccggaggactttccccggcaactcgccctcatcaaggagctggtggacctcctggggctggcgcgcctcgaggtcccgggctacgaggcggacgacgtcctggccagcctggccaagaaggcggaaaaggagggctacgaggtccgcatcctcaccgccgacaaagacctttaccagctcctttccgaccgcatccacgccctccaccccgaggggtacctcatcaccccggcctggctttgggaaaagtacggcctgaggcccgaccagtgggccgactaccgggccctgaccggggacgagtccgacaaccttcccggggtcaagggcatcggggagaagacggcgaggaagcttctggaggagtgggggagcctggaagccctcctcaagaacctggaccggctgaagcccgccatccgggagaagatcctggcccacatggacgatctgaagctctcctgggacctggccaaggtgcgcaccgacctgcccctggaggtggacttcgccaaaaggcgggagcccgaccgggagaggcttagggcctttctggagaggcttgagtttggcagcctcctccacgagttcggccttctggaaagccccaaggccctggaggaggccccctggcccccgccggaaggggccttcgtgggctttgtgctttcccgcaaggagcccatgtgggccgatcttctggccctggccgccgccagggggggccgggtccaccgggcccccgagccttataaagccctcagggacctgaaggaggcgcgggggcttctcgccaaagacctgagcgttctggccctgagggaaggccttggcctcccgcccggcgacgaccccatgctcctcgcctacctcctggacccttccaacaccacccccgagggggtggcccggcgctacggcggggagtggacggaggaggcgggggagcgggccgccctttccgagaggctcttcgccaacctgtgggggaggcttgagggggaggagaggctcctttggctttaccgggaggtggagaggcccctttccgctgtcctggcccacatggaggccacgggggtgcgcctggacgtggcctatctcagggccttgtccctggaggtggccgaggagatcgcccgcctcgaggccgaggtcttccgcctggccggccaccccttcaacctcaactcccgggaccagctggaaagggtcctctttgacgagctagggcttcccgccatcggcaagacggagaagaccggcaagcgctccaccagcgccgccgtcctggaggccctccgcgaggcccaccccatcgtggagaagatcctgcagtaccgggagctcaccaagctgaagagcacctacattgaccccttgccggacctcatccaccccaggacgggccgcctccacacccgcttcaaccagacggccacggccacgggcaggctaagtagctatgatcccaacctccagaacatccccgtccgcaccccgcttgggcagaggatccgccgggccttcatcgccgaggaggggtggctattggtggccctggactatagccagatagagctcagggtgctggcccacctctccggcgacgagaacctgatccgggtcttccaggaggggcgggacatccacacggagaccgccagctggatgttcggcgtcccccgggaggccgtggaccccctgatgcgccgggcggccaagaccatcaacttcggggtcctctacggcatgtcggcccaccgcctctcccaggagctagccatcccttacgaggaggcccaggccttcattgagcgctactttcagagcttccccaaggtgcgggcctggattgagaagaccctggaggagggcaggaggcgggggtacgtggagaccctcttcggccgccgccgctacgtgccagacctagaggcccgggtgaagagcgtgcgggaggcggccgagcgcatggccttcaacatgcccgtccagggcaccgccgccgacctcatgaagctggctatggtgaagctcttccccaggctggaggaaatgggggccaggatgctccttcaggtccacgacgagctggtcctcgaggccccaaaagagagggcggaggccgtggcccggctggccaaggaggtcatggagggggtgtatcccctggccgtgcccctggaggtggaggtggggataggggaggactggctctccgccaaggagtgataccaccccatgctggcccaagccagcatgggggccccggcaaaaggtttctggggaagttaccaggcatggtgggccgaaggaaacaggaaacaagggtatgagggttttttgccctaaagaaaggccagggggtcctcccgaaggaaggcttccagggggataccccctgggcccaggagtagcccctttcctccaaaggcctgggtgaaggcttttagccctttggtcctttgggaaggggcgcttttgacctccaaagccagaaggcgccttcccttcttcaagacgaagtcaacctcctggtccctttcccgccagtagtacacctcaaagcccccgtgggggccgtgggccagaaggtgggcgcccacggcggtttccacgagccgccccatgagggcggcgtccgcccacacctcctttggggaaagccccaagaccgccgtgatgagccccgtattaagggccaggagcttggggctcgaggcgcggcgccggaagggctcggcggcgtacttctgcag

SEQ ID NO: 3387 - DNA, 3026 bp, Artificial Sequence
  Description of Artificial Sequence: Synthetic DNA sequence of Thermus aquaticus DNA Polymerase S577W
atgagggggatgctgcccctctttgagcccaagggccgggtcctcctggtggacggccaccacctggcctaccgcaccttccacgccctgaagggcctcaccaccagccggggggagccggtgcaggcggtctacggcttcgccaagagcctcctcaaggccctcaaggaggacggggacgcggtgatcgtggtctttgacgccaaggccccctccttccgccacgaggcctacggggggtacaaggcgggccgggcccccacgccggaggactttccccggcaactcgccctcatcaaggagctggtggacctcctggggctggcgcgcctcgaggtcccgggctacgaggcggacgacgtcctggccagcctggccaagaaggcggaaaaggagggctacgaggtccgcatcctcaccgccgacaaagacctttaccagctcctttccgaccgcatccacgccctccaccccgaggggtacctcatcaccccggcctggctttgggaaaagtacggcctgaggcccgaccagtgggccgactaccgggccctgaccggggacgagtccgacaaccttcccggggtcaagggcatcggggagaagacggcgaggaagcttctggaggagtgggggagcctggaagccctcctcaagaacctggaccggctgaagcccgccatccgggagaagatcctggcccacatggacgatctgaagctctcctgggacctggccaaggtgcgcaccgacctgcccctggaggtggacttcgccaaaaggcgggagcccgaccgggagaggcttagggcctttctggagaggcttgagtttggcagcctcctccacgagttcggccttctggaaagccccaaggccctggaggaggccccctggcccccgccggaaggggccttcgtgggctttgtgctttcccgcaaggagcccatgtgggccgatcttctggccctggccgccgccagggggggccgggtccaccgggcccccgagccttataaagccctcagggacctgaaggaggcgcgggggcttctcgccaaagacctgagcgttctggccctgagggaaggccttggcctcccgcccggcgacgaccccatgctcctcgcctacctcctggacccttccaacaccacccccgagggggtggcccggcgctacggcggggagtggacggaggaggcgggggagcgggccgccctttccgagaggctcttcgccaacctgtgggggaggcttgagggggaggagaggctcctttggctttaccgggaggtggagaggcccctttccgctgtcctggcccacatggaggccacgggggtgcgcctggacgtggcctatctcagggccttgtccctggaggtggccgaggagatcgcccgcctcgaggccgaggtcttccgcctggccggccaccccttcaacctcaactcccgggaccagctggaaagggtcctctttgacgagctagggcttcccgccatcggcaagacggagaagaccggcaagcgctccaccagcgccgccgtcctggaggccctccgcgaggcccaccccatcgtggagaagatcctgcagtaccgggagctcaccaagctgaagagcacctacattgaccccttgccggacctcatccaccccaggacgggccgcctccacacccgcttcaaccagacggccacggccacgggcaggctaagtagctgggatcccaacctccagaacatccccgtccgcaccccgcttgggcagaggatccgccgggccttcatcgccgaggaggggtggctattggtggccctggactatagccagatagagctcagggtgctggcccacctctccggcgacgagaacctgatccgggtcttccaggaggggcgggacatccacacggagaccgccagctggatgttcggcgtcccccgggaggccgtggaccccctgatgcgccgggcggccaagaccatcaacttcggggtcctctacggcatgtcggcccaccgcctctcccaggagctagccatcccttacgaggaggcccaggccttcattgagcgctactttcagagcttccccaaggtgcgggcctggattgagaagaccctggaggagggcaggaggcgggggtacgtggagaccctcttcggccgccgccgctacgtgccagacctagaggcccgggtgaagagcgtgcgggaggcggccgagcgcatggccttcaacatgcccgtccagggcaccgccgccgacctcatgaagctggctatggtgaagctcttccccaggctggaggaaatgggggccaggatgctccttcaggtccacgacgagctggtcctcgaggccccaaaagagagggcggaggccgtggcccggctggccaaggaggtcatggagggggtgtatcccctggccgtgcccctggaggtggaggtggggataggggaggactggctctccgccaaggagtgataccaccccatgctggcccaagccagcatgggggccccggcaaaaggtttctggggaagttaccaggcatggtgggccgaaggaaacaggaaacaagggtatgagggttttttgccctaaagaaaggccagggggtcctcccgaaggaaggcttccagggggataccccctgggcccaggagtagcccctttcctccaaaggcctgggtgaaggcttttagccctttggtcctttgggaaggggcgcttttgacctccaaagccagaaggcgccttcccttcttcaagacgaagtcaacctcctggtccctttcccgccagtagtacacctcaaagcccccgtgggggccgtgggccagaaggtgggcgcccacggcggtttccacgagccgccccatgagggcggcgtccgcccacacctcctttggggaaagccccaagaccgccgtgatgagccccgtattaagggccaggagcttggggctcgaggcgcggcgccggaagggctcggcggcgtacttctgcag

SEQ ID NO: 3388 - DNA, 3026 bp, Artificial Sequence
  Description of Artificial Sequence: Synthetic DNA sequence of Thermus aquaticus DNA Polymerase S577P
atgagggggatgctgcccctctttgagcccaagggccgggtcctcctggtggacggccaccacctggcctaccgcaccttccacgccctgaagggcctcaccaccagccggggggagccggtgcaggcggtctacggcttcgccaagagcctcctcaaggccctcaaggaggacggggacgcggtgatcgtggtctttgacgccaaggccccctccttccgccacgaggcctacggggggtacaaggcgggccgggcccccacgccggaggactttccccggcaactcgccctcatcaaggagctggtggacctcctggggctggcgcgcctcgaggtcccgggctacgaggcggacgacgtcctggccagcctggccaagaaggcggaaaaggagggctacgaggtccgcatcctcaccgccgacaaagacctttaccagctcctttccgaccgcatccacgccctccaccccgaggggtacctcatcaccccggcctggctttgggaaaagtacggcctgaggcccgaccagtgggccgactaccgggccctgaccggggacgagtccgacaaccttcccggggtcaagggcatcggggagaagacggcgaggaagcttctggaggagtgggggagcctggaagccctcctcaagaacctggaccggctgaagcccgccatccgggagaagatcctggcccacatggacgatctgaagctctcctgggacctggccaaggtgcgcaccgacctgcccctggaggtggacttcgccaaaaggcgggagcccgaccgggagaggcttagggcctttctggagaggcttgagtttggcagcctcctccacgagttcggccttctggaaagccccaaggccctggaggaggccccctggcccccgccggaaggggccttcgtgggctttgtgctttcccgcaaggagcccatgtgggccgatcttctggccctggccgccgccagggggggccgggtccaccgggcccccgagccttataaagccctcagggacctgaaggaggcgcgggggcttctcgccaaagacctgagcgttctggccctgagggaaggccttggcctcccgcccggcgacgaccccatgctcctcgcctacctcctggacccttccaacaccacccccgagggggtggcccggcgctacggcggggagtggacggaggaggcgggggagcgggccgccctttccgagaggctcttcgccaacctgtgggggaggcttgagggggaggagaggctcctttggctttaccgggaggtggagaggcccctttccgctgtcctggcccacatggaggccacgggggtgcgcctggacgtggcctatctcagggccttgtccctggaggtggccgaggagatcgcccgcctcgaggccgaggtcttccgcctggccggccaccccttcaacctcaactcccgggaccagctggaaagggtcctctttgacgagctagggcttcccgccatcggcaagacggagaagaccggcaagcgctccaccagcgccgccgtcctggaggccctccgcgaggcccaccccatcgtggagaagatcctgcagtaccgggagctcaccaagctgaagagcacctacattgaccccttgccggacctcatccaccccaggacgggccgcctccacacccgcttcaaccagacggccacggccacgggcaggctaagtagccctgatcccaacctccagaacatccccgtccgcaccccgcttgggcagaggatccgccgggccttcatcgccgaggaggggtggctattggtggccctggactatagccagatagagctcagggtgctggcccacctctccggcgacgagaacctgatccgggtcttccaggaggggcgggacatccacacggagaccgccagctggatgttcggcgtcccccgggaggccgtggaccccctgatgcgccgggcggccaagaccatcaacttcggggtcctctacggcatgtcggcccaccgcctctcccaggagctagccatcccttacgaggaggcccaggccttcattgagcgctactttcagagcttccccaaggtgcgggcctggattgagaagaccctggaggagggcaggaggcgggggtacgtggagaccctcttcggccgccgccgctacgtgccagacctagaggcccgggtgaagagcgtgcgggaggcggccgagcgcatggccttcaacatgcccgtccagggcaccgccgccgacctcatgaagctggctatggtgaagctcttccccaggctggaggaaatgggggccaggatgctccttcaggtccacgacgagctggtcctcgaggccccaaaagagagggcggaggccgtggcccggctggccaaggaggtcatggagggggtgtatcccctggccgtgcccctggaggtggaggtggggataggggaggactggctctccgccaaggagtgataccaccccatgctggcccaagccagcatgggggccccggcaaaaggtttctggggaagttaccaggcatggtgggccgaaggaaacaggaaacaagggtatgagggttttttgccctaaagaaaggccagggggtcctcccgaaggaaggcttccagggggataccccctgggcccaggagtagcccctttcctccaaaggcctgggtgaaggcttttagccctttggtcctttgggaaggggcgcttttgacctccaaagccagaaggcgccttcccttcttcaagacgaagtcaacctcctggtccctttcccgccagtagtacacctcaaagcccccgtgggggccgtgggccagaaggtgggcgcccacggcggtttccacgagccgccccatgagggcggcgtccgcccacacctcctttggggaaagccccaagaccgccgtgatgagccccgtattaagggccaggagcttggggctcgaggcgcggcgccggaagggctcggcggcgtacttctgcag

SEQ ID NO: 3389 - DNA, 3026 bp, Artificial Sequence
  Description of Artificial Sequence: Synthetic DNA sequence of Thermus aquaticus DNA Polymerase S577M
atgagggggatgctgcccctctttgagcccaagggccgggtcctcctggtggacggccaccacctggcctaccgcaccttccacgccctgaagggcctcaccaccagccggggggagccggtgcaggcggtctacggcttcgccaagagcctcctcaaggccctcaaggaggacggggacgcggtgatcgtggtctttgacgccaaggccccctccttccgccacgaggcctacggggggtacaaggcgggccgggcccccacgccggaggactttccccggcaactcgccctcatcaaggagctggtggacctcctggggctggcgcgcctcgaggtcccgggctacgaggcggacgacgtcctggccagcctggccaagaaggcggaaaaggagggctacgaggtccgcatcctcaccgccgacaaagacctttaccagctcctttccgaccgcatccacgccctccaccccgaggggtacctcatcaccccggcctggctttgggaaaagtacggcctgaggcccgaccagtgggccgactaccgggccctgaccggggacgagtccgacaaccttcccggggtcaagggcatcggggagaagacggcgaggaagcttctggaggagtgggggagcctggaagccctcctcaagaacctggaccggctgaagcccgccatccgggagaagatcctggcccacatggacgatctgaagctctcctgggacctggccaaggtgcgcaccgacctgcccctggaggtggacttcgccaaaaggcgggagcccgaccgggagaggcttagggcctttctggagaggcttgagtttggcagcctcctccacgagttcggccttctggaaagccccaaggccctggaggaggccccctggcccccgccggaaggggccttcgtgggctttgtgctttcccgcaaggagcccatgtgggccgatcttctggccctggccgccgccagggggggccgggtccaccgggcccccgagccttataaagccctcagggacctgaaggaggcgcgggggcttctcgccaaagacctgagcgttctggccctgagggaaggccttggcctcccgcccggcgacgaccccatgctcctcgcctacctcctggacccttccaacaccacccccgagggggtggcccggcgctacggcggggagtggacggaggaggcgggggagcgggccgccctttccgagaggctcttcgccaacctgtgggggaggcttgagggggaggagaggctcctttggctttaccgggaggtggagaggcccctttccgctgtcctggcccacatggaggccacgggggtgcgcctggacgtggcctatctcagggccttgtccctggaggtggccgaggagatcgcccgcctcgaggccgaggtcttccgcctggccggccaccccttcaacctcaactcccgggaccagctggaaagggtcctctttgacgagctagggcttcccgccatcggcaagacggagaagaccggcaagcgctccaccagcgccgccgtcctggaggccctccgcgaggcccaccccatcgtggagaagatcctgcagtaccgggagctcaccaagctgaagagcacctacattgaccccttgccggacctcatccaccccaggacgggccgcctccacacccgcttcaaccagacggccacggccacgggcaggctaagtagcatggatcccaacctccagaacatccccgtccgcaccccgcttgggcagaggatccgccgggccttcatcgccgaggaggggtggctattggtggccctggactatagccagatagagctcagggtgctggcccacctctccggcgacgagaacctgatccgggtcttccaggaggggcgggacatccacacggagaccgccagctggatgttcggcgtcccccgggaggccgtggaccccctgatgcgccgggcggccaagaccatcaacttcggggtcctctacggcatgtcggcccaccgcctctcccaggagctagccatcccttacgaggaggcccaggccttcattgagcgctactttcagagcttccccaaggtgcgggcctggattgagaagaccctggaggagggcaggaggcgggggtacgtggagaccctcttcggccgccgccgctacgtgccagacctagaggcccgggtgaagagcgtgcgggaggcggccgagcgcatggccttcaacatgcccgtccagggcaccgccgccgacctcatgaagctggctatggtgaagctcttccccaggctggaggaaatgggggccaggatgctccttcaggtccacgacgagctggtcctcgaggccccaaaagagagggcggaggccgtggcccggctggccaaggaggtcatggagggggtgtatcccctggccgtgcccctggaggtggaggtggggataggggaggactggctctccgccaaggagtgataccaccccatgctggcccaagccagcatgggggccccggcaaaaggtttctggggaagttaccaggcatggtgggccgaaggaaacaggaaacaagggtatgagggttttttgccctaaagaaaggccagggggtcctcccgaaggaaggcttccagggggataccccctgggcccaggagtagcccctttcctccaaaggcctgggtgaaggcttttagccctttggtcctttgggaaggggcgcttttgacctccaaagccagaaggcgccttcccttcttcaagacgaagtcaacctcctggtccctttcccgccagtagtacacctcaaagcccccgtgggggccgtgggccagaaggtgggcgcccacggcggtttccacgagccgccccatgagggcggcgtccgcccacacctcctttggggaaagccccaagaccgccgtgatgagccccgtattaagggccaggagcttggggctcgaggcgcggcgccggaagggctcggcggcgtacttctgcag

SEQ ID NO: 3390 - DNA, 3026 bp, Artificial Sequence
  Description of Artificial Sequence: Synthetic DNA sequence of Thermus aquaticus DNA Polymerase S577T
atgagggggatgctgcccctctttgagcccaagggccgggtcctcctggtggacggccaccacctggcctaccgcaccttccacgccctgaagggcctcaccaccagccggggggagccggtgcaggcggtctacggcttcgccaagagcctcctcaaggccctcaaggaggacggggacgcggtgatcgtggtctttgacgccaaggccccctccttccgccacgaggcctacggggggtacaaggcgggccgggcccccacgccggaggactttccccggcaactcgccctcatcaaggagctggtggacctcctggggctggcgcgcctcgaggtcccgggctacgaggcggacgacgtcctggccagcctggccaagaaggcggaaaaggagggctacgaggtccgcatcctcaccgccgacaaagacctttaccagctcctttccgaccgcatccacgccctccaccccgaggggtacctcatcaccccggcctggctttgggaaaagtacggcctgaggcccgaccagtgggccgactaccgggccctgaccggggacgagtccgacaaccttcccggggtcaagggcatcggggagaagacggcgaggaagcttctggaggagtgggggagcctggaagccctcctcaagaacctggaccggctgaagcccgccatccgggagaagatcctggcccacatggacgatctgaagctctcctgggacctggccaaggtgcgcaccgacctgcccctggaggtggacttcgccaaaaggcgggagcccgaccgggagaggcttagggcctttctggagaggcttgagtttggcagcctcctccacgagttcggccttctggaaagccccaaggccctggaggaggccccctggcccccgccggaaggggccttcgtgggctttgtgctttcccgcaaggagcccatgtgggccgatcttctggccctggccgccgccagggggggccgggtccaccgggcccccgagccttataaagccctcagggacctgaaggaggcgcgggggcttctcgccaaagacctgagcgttctggccctgagggaaggccttggcctcccgcccggcgacgaccccatgctcctcgcctacctcctggacccttccaacaccacccccgagggggtggcccggcgctacggcggggagtggacggaggaggcgggggagcgggccgccctttccgagaggctcttcgccaacctgtgggggaggcttgagggggaggagaggctcctttggctttaccgggaggtggagaggcccctttccgctgtcctggcccacatggaggccacgggggtgcgcctggacgtggcctatctcagggccttgtccctggaggtggccgaggagatcgcccgcctcgaggccgaggtcttccgcctggccggccaccccttcaacctcaactcccgggaccagctggaaagggtcctctttgacgagctagggcttcccgccatcggcaagacggagaagaccggcaagcgctccaccagcgccgccgtcctggaggccctccgcgaggcccaccccatcgtggagaagatcctgcagtaccgggagctcaccaagctgaagagcacctacattgaccccttgccggacctcatccaccccaggacgggccgcctccacacccgcttcaaccagacggccacggccacgggcaggctaagtagcactgatcccaacctccagaacatccccgtccgcaccccgcttgggcagaggatccgccgggccttcatcgccgaggaggggtggctattggtggccctggactatagccagatagagctcagggtgctggcccacctctccggcgacgagaacctgatccgggtcttccaggaggggcgggacatccacacggagaccgccagctggatgttcggcgtcccccgggaggccgtggaccccctgatgcgccgggcggccaagaccatcaacttcggggtcctctacggcatgtcggcccaccgcctctcccaggagctagccatcccttacgaggaggcccaggccttcattgagcgctactttcagagcttccccaaggtgcgggcctggattgagaagaccctggaggagggcaggaggcgggggtacgtggagaccctcttcggccgccgccgctacgtgccagacctagaggcccgggtgaagagcgtgcgggaggcggccgagcgcatggccttcaacatgcccgtccagggcaccgccgccgacctcatgaagctggctatggtgaagctcttccccaggctggaggaaatgggggccaggatgctccttcaggtccacgacgagctggtcctcgaggccccaaaagagagggcggaggccgtggcccggctggccaaggaggtcatggagggggtgtatcccctggccgtgcccctggaggtggaggtggggataggggaggactggctctccgccaaggagtgataccaccccatgctggcccaagccagcatgggggccccggcaaaaggtttctggggaagttaccaggcatggtgggccgaaggaaacaggaaacaagggtatgagggttttttgccctaaagaaaggccagggggtcctcccgaaggaaggcttccagggggataccccctgggcccaggagtagcccctttcctccaaaggcctgggtgaaggcttttagccctttggtcctttgggaaggggcgcttttgacctccaaagccagaaggcgccttcccttcttcaagacgaagtcaacctcctggtccctttcccgccagtagtacacctcaaagcccccgtgggggccgtgggccagaaggtgggcgcccacggcggtttccacgagccgccccatgagggcggcgtccgcccacacctcctttggggaaagccccaagaccgccgtgatgagccccgtattaagggccaggagcttggggctcgaggcgcggcgccggaagggctcggcggcgtacttctgcag

SEQ ID NO: 3391 - DNA, 3026 bp, Artificial Sequence
  Description of Artificial Sequence: Synthetic DNA sequence of Thermus aquaticus DNA Polymerase S577N
atgagggggatgctgcccctctttgagcccaagggccgggtcctcctggtggacggccaccacctggcctaccgcaccttccacgccctgaagggcctcaccaccagccggggggagccggtgcaggcggtctacggcttcgccaagagcctcctcaaggccctcaaggaggacggggacgcggtgatcgtggtctttgacgccaaggccccctccttccgccacgaggcctacggggggtacaaggcgggccgggcccccacgccggaggactttccccggcaactcgccctcatcaaggagctggtggacctcctggggctggcgcgcctcgaggtcccgggctacgaggcggacgacgtcctggccagcctggccaagaaggcggaaaaggagggctacgaggtccgcatcctcaccgccgacaaagacctttaccagctcctttccgaccgcatccacgccctccaccccgaggggtacctcatcaccccggcctggctttgggaaaagtacggcctgaggcccgaccagtgggccgactaccgggccctgaccggggacgagtccgacaaccttcccggggtcaagggcatcggggagaagacggcgaggaagcttctggaggagtgggggagcctggaagccctcctcaagaacctggaccggctgaagcccgccatccgggagaagatcctggcccacatggacgatctgaagctctcctgggacctggccaaggtgcgcaccgacctgcccctggaggtggacttcgccaaaaggcgggagcccgaccgggagaggcttagggcctttctggagaggcttgagtttggcagcctcctccacgagttcggccttctggaaagccccaaggccctggaggaggccccctggcccccgccggaaggggccttcgtgggctttgtgctttcccgcaaggagcccatgtgggccgatcttctggccctggccgccgccagggggggccgggtccaccgggcccccgagccttataaagccctcagggacctgaaggaggcgcgggggcttctcgccaaagacctgagcgttctggccctgagggaaggccttggcctcccgcccggcgacgaccccatgctcctcgcctacctcctggacccttccaacaccacccccgagggggtggcccggcgctacggcggggagtggacggaggaggcgggggagcgggccgccctttccgagaggctcttcgccaacctgtgggggaggcttgagggggaggagaggctcctttggctttaccgggaggtggagaggcccctttccgctgtcctggcccacatggaggccacgggggtgcgcctggacgtggcctatctcagggccttgtccctggaggtggccgaggagatcgcccgcctcgaggccgaggtcttccgcctggccggccaccccttcaacctcaactcccgggaccagctggaaagggtcctctttgacgagctagggcttcccgccatcggcaagacggagaagaccggcaagcgctccaccagcgccgccgtcctggaggccctccgcgaggcccaccccatcgtggagaagatcctgcagtaccgggagctcaccaagctgaagagcacctacattgaccccttgccggacctcatccaccccaggacgggccgcctccacacccgcttcaaccagacggccacggccacgggcaggctaagtagcaatgatcccaacctccagaacatccccgtccgcaccccgcttgggcagaggatccgccgggccttcatcgccgaggaggggtggctattggtggccctggactatagccagatagagctcagggtgctggcccacctctccggcgacgagaacctgatccgggtcttccaggaggggcgggacatccacacggagaccgccagctggatgttcggcgtcccccgggaggccgtggaccccctgatgcgccgggcggccaagaccatcaacttcggggtcctctacggcatgtcggcccaccgcctctcccaggagctagccatcccttacgaggaggcccaggccttcattgagcgctactttcagagcttccccaaggtgcgggcctggattgagaagaccctggaggagggcaggaggcgggggtacgtggagaccctcttcggccgccgccgctacgtgccagacctagaggcccgggtgaagagcgtgcgggaggcggccgagcgcatggccttcaacatgcccgtccagggcaccgccgccgacctcatgaagctggctatggtgaagctcttccccaggctggaggaaatgggggccaggatgctccttcaggtccacgacgagctggtcctcgaggccccaaaagagagggcggaggccgtggcccggctggccaaggaggtcatggagggggtgtatcccctggccgtgcccctggaggtggaggtggggataggggaggactggctctccgccaaggagtgataccaccccatgctggcccaagccagcatgggggccccggcaaaaggtttctggggaagttaccaggcatggtgggccgaaggaaacaggaaacaagggtatgagggttttttgccctaaagaaaggccagggggtcctcccgaaggaaggcttccagggggataccccctgggcccaggagtagcccctttcctccaaaggcctgggtgaaggcttttagccctttggtcctttgggaaggggcgcttttgacctccaaagccagaaggcgccttcccttcttcaagacgaagtcaacctcctggtccctttcccgccagtagtacacctcaaagcccccgtgggggccgtgggccagaaggtgggcgcccacggcggtttccacgagccgccccatgagggcggcgtccgcccacacctcctttggggaaagccccaagaccgccgtgatgagccccgtattaagggccaggagcttggggctcgaggcgcggcgccggaagggctcggcggcgtacttctgcag

SEQ ID NO: 3392 - DNA, 3026 bp, Artificial Sequence
  Description of Artificial Sequence: Synthetic DNA sequence of Thermus aquaticus DNA Polymerase S577V
atgagggggatgctgcccctctttgagcccaagggccgggtcctcctggtggacggccaccacctggcctaccgcaccttccacgccctgaagggcctcaccaccagccggggggagccggtgcaggcggtctacggcttcgccaagagcctcctcaaggccctcaaggaggacggggacgcggtgatcgtggtctttgacgccaaggccccctccttccgccacgaggcctacggggggtacaaggcgggccgggcccccacgccggaggactttccccggcaactcgccctcatcaaggagctggtggacctcctggggctggcgcgcctcgaggtcccgggctacgaggcggacgacgtcctggccagcctggccaagaaggcggaaaaggagggctacgaggtccgcatcctcaccgccgacaaagacctttaccagctcctttccgaccgcatccacgccctccaccccgaggggtacctcatcaccccggcctggctttgggaaaagtacggcctgaggcccgaccagtgggccgactaccgggccctgaccggggacgagtccgacaaccttcccggggtcaagggcatcggggagaagacggcgaggaagcttctggaggagtgggggagcctggaagccctcctcaagaacctggaccggctgaagcccgccatccgggagaagatcctggcccacatggacgatctgaagctctcctgggacctggccaaggtgcgcaccgacctgcccctggaggtggacttcgccaaaaggcgggagcccgaccgggagaggcttagggcctttctggagaggcttgagtttggcagcctcctccacgagttcggccttctggaaagccccaaggccctggaggaggccccctggcccccgccggaaggggccttcgtgggctttgtgctttcccgcaaggagcccatgtgggccgatcttctggccctggccgccgccagggggggccgggtccaccgggcccccgagccttataaagccctcagggacctgaaggaggcgcgggggcttctcgccaaagacctgagcgttctggccctgagggaaggccttggcctcccgcccggcgacgaccccatgctcctcgcctacctcctggacccttccaacaccacccccgagggggtggcccggcgctacggcggggagtggacggaggaggcgggggagcgggccgccctttccgagaggctcttcgccaacctgtgggggaggcttgagggggaggagaggctcctttggctttaccgggaggtggagaggcccctttccgctgtcctggcccacatggaggccacgggggtgcgcctggacgtggcctatctcagggccttgtccctggaggtggccgaggagatcgcccgcctcgaggccgaggtcttccgcctggccggccaccccttcaacctcaactcccgggaccagctggaaagggtcctctttgacgagctagggcttcccgccatcggcaagacggagaagaccggcaagcgctccaccagcgccgccgtcctggaggccctccgcgaggcccaccccatcgtggagaagatcctgcagtaccgggagctcaccaagctgaagagcacctacattgaccccttgccggacctcatccaccccaggacgggccgcctccacacccgcttcaaccagacggccacggccacgggcaggctaagtagcgtcgatcccaacctccagaacatccccgtccgcaccccgcttgggcagaggatccgccgggccttcatcgccgaggaggggtggctattggtggccctggactatagccagatagagctcagggtgctggcccacctctccggcgacgagaacctgatccgggtcttccaggaggggcgggacatccacacggagaccgccagctggatgttcggcgtcccccgggaggccgtggaccccctgatgcgccgggcggccaagaccatcaacttcggggtcctctacggcatgtcggcccaccgcctctcccaggagctagccatcccttacgaggaggcccaggccttcattgagcgctactttcagagcttccccaaggtgcgggcctggattgagaagaccctggaggagggcaggaggcgggggtacgtggagaccctcttcggccgccgccgctacgtgccagacctagaggcccgggtgaagagcgtgcgggaggcggccgagcgcatggccttcaacatgcccgtccagggcaccgccgccgacctcatgaagctggctatggtgaagctcttccccaggctggaggaaatgggggccaggatgctccttcaggtccacgacgagctggtcctcgaggccccaaaagagagggcggaggccgtggcccggctggccaaggaggtcatggagggggtgtatcccctggccgtgcccctggaggtggaggtggggataggggaggactggctctccgccaaggagtgataccaccccatgctggcccaagccagcatgggggccccggcaaaaggtttctggggaagttaccaggcatggtgggccgaaggaaacaggaaacaagggtatgagggttttttgccctaaagaaaggccagggggtcctcccgaaggaaggcttccagggggataccccctgggcccaggagtagcccctttcctccaaaggcctgggtgaaggcttttagccctttggtcctttgggaaggggcgcttttgacctccaaagccagaaggcgccttcccttcttcaagacgaagtcaacctcctggtccctttcccgccagtagtacacctcaaagcccccgtgggggccgtgggccagaaggtgggcgcccacggcggtttccacgagccgccccatgagggcggcgtccgcccacacctcctttggggaaagccccaagaccgccgtgatgagccccgtattaagggccaggagcttggggctcgaggcgcggcgccggaagggctcggcggcgtacttctgcag

SEQ ID NO: 3393 - DNA, 3026 bp, Artificial Sequence
  Description of Artificial Sequence: Synthetic DNA sequence of Thermus aquaticus DNA Polymerase D578A
atgagggggatgctgcccctctttgagcccaagggccgggtcctcctggtggacggccaccacctggcctaccgcaccttccacgccctgaagggcctcaccaccagccggggggagccggtgcaggcggtctacggcttcgccaagagcctcctcaaggccctcaaggaggacggggacgcggtgatcgtggtctttgacgccaaggccccctccttccgccacgaggcctacggggggtacaaggcgggccgggcccccacgccggaggactttccccggcaactcgccctcatcaaggagctggtggacctcctggggctggcgcgcctcgaggtcccgggctacgaggcggacgacgtcctggccagcctggccaagaaggcggaaaaggagggctacgaggtccgcatcctcaccgccgacaaagacctttaccagctcctttccgaccgcatccacgccctccaccccgaggggtacctcatcaccccggcctggctttgggaaaagtacggcctgaggcccgaccagtgggccgactaccgggccctgaccggggacgagtccgacaaccttcccggggtcaagggcatcggggagaagacggcgaggaagcttctggaggagtgggggagcctggaagccctcctcaagaacctggaccggctgaagcccgccatccgggagaagatcctggcccacatggacgatctgaagctctcctgggacctggccaaggtgcgcaccgacctgcccctggaggtggacttcgccaaaaggcgggagcccgaccgggagaggcttagggcctttctggagaggcttgagtttggcagcctcctccacgagttcggccttctggaaagccccaaggccctggaggaggccccctggcccccgccggaaggggccttcgtgggctttgtgctttcccgcaaggagcccatgtgggccgatcttctggccctggccgccgccagggggggccgggtccaccgggcccccgagccttataaagccctcagggacctgaaggaggcgcgggggcttctcgccaaagacctgagcgttctggccctgagggaaggccttggcctcccgcccggcgacgaccccatgctcctcgcctacctcctggacccttccaacaccacccccgagggggtggcccggcgctacggcggggagtggacggaggaggcgggggagcgggccgccctttccgagaggctcttcgccaacctgtgggggaggcttgagggggaggagaggctcctttggctttaccgggaggtggagaggcccctttccgctgtcctggcccacatggaggccacgggggtgcgcctggacgtggcctatctcagggccttgtccctggaggtggccgaggagatcgcccgcctcgaggccgaggtcttccgcctggccggccaccccttcaacctcaactcccgggaccagctggaaagggtcctctttgacgagctagggcttcccgccatcggcaagacggagaagaccggcaagcgctccaccagcgccgccgtcctggaggccctccgcgaggcccaccccatcgtggagaagatcctgcagtaccgggagctcaccaagctgaagagcacctacattgaccccttgccggacctcatccaccccaggacgggccgcctccacacccgcttcaaccagacggccacggccacgggcaggctaagtagctccgctcccaacctccagaacatccccgtccgcaccccgcttgggcagaggatccgccgggccttcatcgccgaggaggggtggctattggtggccctggactatagccagatagagctcagggtgctggcccacctctccggcgacgagaacctgatccgggtcttccaggaggggcgggacatccacacggagaccgccagctggatgttcggcgtcccccgggaggccgtggaccccctgatgcgccgggcggccaagaccatcaacttcggggtcctctacggcatgtcggcccaccgcctctcccaggagctagccatcccttacgaggaggcccaggccttcattgagcgctactttcagagcttccccaaggtgcgggcctggattgagaagaccctggaggagggcaggaggcgggggtacgtggagaccctcttcggccgccgccgctacgtgccagacctagaggcccgggtgaagagcgtgcgggaggcggccgagcgcatggccttcaacatgcccgtccagggcaccgccgccgacctcatgaagctggctatggtgaagctcttccccaggctggaggaaatgggggccaggatgctccttcaggtccacgacgagctggtcctcgaggccccaaaagagagggcggaggccgtggcccggctggccaaggaggtcatggagggggtgtatcccctggccgtgcccctggaggtggaggtggggataggggaggactggctctccgccaaggagtgataccaccccatgctggcccaagccagcatgggggccccggcaaaaggtttctggggaagttaccaggcatggtgggccgaaggaaacaggaaacaagggtatgagggttttttgccctaaagaaaggccagggggtcctcccgaaggaaggcttccagggggataccccctgggcccaggagtagcccctttcctccaaaggcctgggtgaaggcttttagccctttggtcctttgggaaggggcgcttttgacctccaaagccagaaggcgccttcccttcttcaagacgaagtcaacctcctggtccctttcccgccagtagtacacctcaaagcccccgtgggggccgtgggccagaaggtgggcgcccacggcggtttccacgagccgccccatgagggcggcgtccgcccacacctcctttggggaaagccccaagaccgccgtgatgagccccgtattaagggccaggagcttggggctcgaggcgcggcgccggaagggctcggcggcgtacttctgcag

SEQ ID NO: 3394 - DNA, 3026 bp, Artificial Sequence
  Description of Artificial Sequence: Synthetic DNA sequence of Thermus aquaticus DNA Polymerase D578R
atgagggggatgctgcccctctttgagcccaagggccgggtcctcctggtggacggccaccacctggcctaccgcaccttccacgccctgaagggcctcaccaccagccggggggagccggtgcaggcggtctacggcttcgccaagagcctcctcaaggccctcaaggaggacggggacgcggtgatcgtggtctttgacgccaaggccccctccttccgccacgaggcctacggggggtacaaggcgggccgggcccccacgccggaggactttccccggcaactcgccctcatcaaggagctggtggacctcctggggctggcgcgcctcgaggtcccgggctacgaggcggacgacgtcctggccagcctggccaagaaggcggaaaaggagggctacgaggtccgcatcctcaccgccgacaaagacctttaccagctcctttccgaccgcatccacgccctccaccccgaggggtacctcatcaccccggcctggctttgggaaaagtacggcctgaggcccgaccagtgggccgactaccgggccctgaccggggacgagtccgacaaccttcccggggtcaagggcatcggggagaagacggcgaggaagcttctggaggagtgggggagcctggaagccctcctcaagaacctggaccggctgaagcccgccatccgggagaagatcctggcccacatggacgatctgaagctctcctgggacctggccaaggtgcgcaccgacctgcccctggaggtggacttcgccaaaaggcgggagcccgaccgggagaggcttagggcctttctggagaggcttgagtttggcagcctcctccacgagttcggccttctggaaagccccaaggccctggaggaggccccctggcccccgccggaaggggccttcgtgggctttgtgctttcccgcaaggagcccatgtgggccgatcttctggccctggccgccgccagggggggccgggtccaccgggcccccgagccttataaagccctcagggacctgaaggaggcgcgggggcttctcgccaaagacctgagcgttctggccctgagggaaggccttggcctcccgcccggcgacgaccccatgctcctcgcctacctcctggacccttccaacaccacccccgagggggtggcccggcgctacggcggggagtggacggaggaggcgggggagcgggccgccctttccgagaggctcttcgccaacctgtgggggaggcttgagggggaggagaggctcctttggctttaccgggaggtggagaggcccctttccgctgtcctggcccacatggaggccacgggggtgcgcctggacgtggcctatctcagggccttgtccctggaggtggccgaggagatcgcccgcctcgaggccgaggtcttccgcctggccggccaccccttcaacctcaactcccgggaccagctggaaagggtcctctttgacgagctagggcttcccgccatcggcaagacggagaagaccggcaagcgctccaccagcgccgccgtcctggaggccctccgcgaggcccaccccatcgtggagaagatcctgcagtaccgggagctcaccaagctgaagagcacctacattgaccccttgccggacctcatccaccccaggacgggccgcctccacacccgcttcaaccagacggccacggccacgggcaggctaagtagctcccgacccaacctccagaacatccccgtccgcaccccgcttgggcagaggatccgccgggccttcatcgccgaggaggggtggctattggtggccctggactatagccagatagagctcagggtgctggcccacctctccggcgacgagaacctgatccgggtcttccaggaggggcgggacatccacacggagaccgccagctggatgttcggcgtcccccgggaggccgtggaccccctgatgcgccgggcggccaagaccatcaacttcggggtcctctacggcatgtcggcccaccgcctctcccaggagctagccatcccttacgaggaggcccaggccttcattgagcgctactttcagagcttccccaaggtgcgggcctggattgagaagaccctggaggagggcaggaggcgggggtacgtggagaccctcttcggccgccgccgctacgtgccagacctagaggcccgggtgaagagcgtgcgggaggcggccgagcgcatggccttcaacatgcccgtccagggcaccgccgccgacctcatgaagctggctatggtgaagctcttccccaggctggaggaaatgggggccaggatgctccttcaggtccacgacgagctggtcctcgaggccccaaaagagagggcggaggccgtggcccggctggccaaggaggtcatggagggggtgtatcccctggccgtgcccctggaggtggaggtggggataggggaggactggctctccgccaaggagtgataccaccccatgctggcccaagccagcatgggggccccggcaaaaggtttctggggaagttaccaggcatggtgggccgaaggaaacaggaaacaagggtatgagggttttttgccctaaagaaaggccagggggtcctcccgaaggaaggcttccagggggataccccctgggcccaggagtagcccctttcctccaaaggcctgggtgaaggcttttagccctttggtcctttgggaaggggcgcttttgacctccaaagccagaaggcgccttcccttcttcaagacgaagtcaacctcctggtccctttcccgccagtagtacacctcaaagcccccgtgggggccgtgggccagaaggtgggcgcccacggcggtttccacgagccgccccatgagggcggcgtccgcccacacctcctttggggaaagccccaagaccgccgtgatgagccccgtattaagggccaggagcttggggctcgaggcgcggcgccggaagggctcggcggcgtacttctgcag

SEQ ID NO: 3395 - DNA, 3026 bp, Artificial Sequence
  Description of Artificial Sequence: Synthetic DNA sequence of Thermus aquaticus DNA Polymerase D578C
atgagggggatgctgcccctctttgagcccaagggccgggtcctcctggtggacggccaccacctggcctaccgcaccttccacgccctgaagggcctcaccaccagccggggggagccggtgcaggcggtctacggcttcgccaagagcctcctcaaggccctcaaggaggacggggacgcggtgatcgtggtctttgacgccaaggccccctccttccgccacgaggcctacggggggtacaaggcgggccgggcccccacgccggaggactttccccggcaactcgccctcatcaaggagctggtggacctcctggggctggcgcgcctcgaggtcccgggctacgaggcggacgacgtcctggccagcctggccaagaaggcggaaaaggagggctacgaggtccgcatcctcaccgccgacaaagacctttaccagctcctttccgaccgcatccacgccctccaccccgaggggtacctcatcaccccggcctggctttgggaaaagtacggcctgaggcccgaccagtgggccgactaccgggccctgaccggggacgagtccgacaaccttcccggggtcaagggcatcggggagaagacggcgaggaagcttctggaggagtgggggagcctggaagccctcctcaagaacctggaccggctgaagcccgccatccgggagaagatcctggcccacatggacgatctgaagctctcctgggacctggccaaggtgcgcaccgacctgcccctggaggtggacttcgccaaaaggcgggagcccgaccgggagaggcttagggcctttctggagaggcttgagtttggcagcctcctccacgagttcggccttctggaaagccccaaggccctggaggaggccccctggcccccgccggaaggggccttcgtgggctttgtgctttcccgcaaggagcccatgtgggccgatcttctggccctggccgccgccagggggggccgggtccaccgggcccccgagccttataaagccctcagggacctgaaggaggcgcgggggcttctcgccaaagacctgagcgttctggccctgagggaaggccttggcctcccgcccggcgacgaccccatgctcctcgcctacctcctggacccttccaacaccacccccgagggggtggcccggcgctacggcggggagtggacggaggaggcgggggagcgggccgccctttccgagaggctcttcgccaacctgtgggggaggcttgagggggaggagaggctcctttggctttaccgggaggtggagaggcccctttccgctgtcctggcccacatggaggccacgggggtgcgcctggacgtggcctatctcagggccttgtccctggaggtggccgaggagatcgcccgcctcgaggccgaggtcttccgcctggccggccaccccttcaacctcaactcccgggaccagctggaaagggtcctctttgacgagctagggcttcccgccatcggcaagacggagaagaccggcaagcgctccaccagcgccgccgtcctggaggccctccgcgaggcccaccccatcgtggagaagatcctgcagtaccgggagctcaccaagctgaagagcacctacattgaccccttgccggacctcatccaccccaggacgggccgcctccacacccgcttcaaccagacggccacggccacgggcaggctaagtagctcctgtcccaacctccagaacatccccgtccgcaccccgcttgggcagaggatccgccgggccttcatcgccgaggaggggtggctattggtggccctggactatagccagatagagctcagggtgctggcccacctctccggcgacgagaacctgatccgggtcttccaggaggggcgggacatccacacggagaccgccagctggatgttcggcgtcccccgggaggccgtggaccccctgatgcgccgggcggccaagaccatcaacttcggggtcctctacggcatgtcggcccaccgcctctcccaggagctagccatcccttacgaggaggcccaggccttcattgagcgctactttcagagcttccccaaggtgcgggcctggattgagaagaccctggaggagggcaggaggcgggggtacgtggagaccctcttcggccgccgccgctacgtgccagacctagaggcccgggtgaagagcgtgcgggaggcggccgagcgcatggccttcaacatgcccgtccagggcaccgccgccgacctcatgaagctggctatggtgaagctcttccccaggctggaggaaatgggggccaggatgctccttcaggtccacgacgagctggtcctcgaggccccaaaagagagggcggaggccgtggcccggctggccaaggaggtcatggagggggtgtatcccctggccgtgcccctggaggtggaggtggggataggggaggactggctctccgccaaggagtgataccaccccatgctggcccaagccagcatgggggccccggcaaaaggtttctggggaagttaccaggcatggtgggccgaaggaaacaggaaacaagggtatgagggttttttgccctaaagaaaggccagggggtcctcccgaaggaaggcttccagggggataccccctgggcccaggagtagcccctttcctccaaaggcctgggtgaaggcttttagccctttggtcctttgggaaggggcgcttttgacctccaaagccagaaggcgccttcccttcttcaagacgaagtcaacctcctggtccctttcccgccagtagtacacctcaaagcccccgtgggggccgtgggccagaaggtgggcgcccacggcggtttccacgagccgccccatgagggcggcgtccgcccacacctcctttggggaaagccccaagaccgccgtgatgagccccgtattaagggccaggagcttggggctcgaggcgcggcgccggaagggctcggcggcgtacttctgcag

SEQ ID NO: 3396 - DNA, 3026 bp, Artificial Sequence
  Description of Artificial Sequence: Synthetic DNA sequence of Thermus aquaticus DNA Polymerase D578G
atgagggggatgctgcccctctttgagcccaagggccgggtcctcctggtggacggccaccacctggcctaccgcaccttccacgccctgaagggcctcaccaccagccggggggagccggtgcaggcggtctacggcttcgccaagagcctcctcaaggccctcaaggaggacggggacgcggtgatcgtggtctttgacgccaaggccccctccttccgccacgaggcctacggggggtacaaggcgggccgggcccccacgccggaggactttccccggcaactcgccctcatcaaggagctggtggacctcctggggctggcgcgcctcgaggtcccgggctacgaggcggacgacgtcctggccagcctggccaagaaggcggaaaaggagggctacgaggtccgcatcctcaccgccgacaaagacctttaccagctcctttccgaccgcatccacgccctccaccccgaggggtacctcatcaccccggcctggctttgggaaaagtacggcctgaggcccgaccagtgggccgactaccgggccctgaccggggacgagtccgacaaccttcccggggtcaagggcatcggggagaagacggcgaggaagcttctggaggagtgggggagcctggaagccctcctcaagaacctggaccggctgaagcccgccatccgggagaagatcctggcccacatggacgatctgaagctctcctgggacctggccaaggtgcgcaccgacctgcccctggaggtggacttcgccaaaaggcgggagcccgaccgggagaggcttagggcctttctggagaggcttgagtttggcagcctcctccacgagttcggccttctggaaagccccaaggccctggaggaggccccctggcccccgccggaaggggccttcgtgggctttgtgctttcccgcaaggagcccatgtgggccgatcttctggccctggccgccgccagggggggccgggtccaccgggcccccgagccttataaagccctcagggacctgaaggaggcgcgggggcttctcgccaaagacctgagcgttctggccctgagggaaggccttggcctcccgcccggcgacgaccccatgctcctcgcctacctcctggacccttccaacaccacccccgagggggtggcccggcgctacggcggggagtggacggaggaggcgggggagcgggccgccctttccgagaggctcttcgccaacctgtgggggaggcttgagggggaggagaggctcctttggctttaccgggaggtggagaggcccctttccgctgtcctggcccacatggaggccacgggggtgcgcctggacgtggcctatctcagggccttgtccctggaggtggccgaggagatcgcccgcctcgaggccgaggtcttccgcctggccggccaccccttcaacctcaactcccgggaccagctggaaagggtcctctttgacgagctagggcttcccgccatcggcaagacggagaagaccggcaagcgctccaccagcgccgccgtcctggaggccctccgcgaggcccaccccatcgtggagaagatcctgcagtaccgggagctcaccaagctgaagagcacctacattgaccccttgccggacctcatccaccccaggacgggccgcctccacacccgcttcaaccagacggccacggccacgggcaggctaagtagctccggtcccaacctccagaacatccccgtccgcaccccgcttgggcagaggatccgccgggccttcatcgccgaggaggggtggctattggtggccctggactatagccagatagagctcagggtgctggcccacctctccggcgacgagaacctgatccgggtcttccaggaggggcgggacatccacacggagaccgccagctggatgttcggcgtcccccgggaggccgtggaccccctgatgcgccgggcggccaagaccatcaacttcggggtcctctacggcatgtcggcccaccgcctctcccaggagctagccatcccttacgaggaggcccaggccttcattgagcgctactttcagagcttccccaaggtgcgggcctggattgagaagaccctggaggagggcaggaggcgggggtacgtggagaccctcttcggccgccgccgctacgtgccagacctagaggcccgggtgaagagcgtgcgggaggcggccgagcgcatggccttcaacatgcccgtccagggcaccgccgccgacctcatgaagctggctatggtgaagctcttccccaggctggaggaaatgggggccaggatgctccttcaggtccacgacgagctggtcctcgaggccccaaaagagagggcggaggccgtggcccggctggccaaggaggtcatggagggggtgtatcccctggccgtgcccctggaggtggaggtggggataggggaggactggctctccgccaaggagtgataccaccccatgctggcccaagccagcatgggggccccggcaaaaggtttctggggaagttaccaggcatggtgggccgaaggaaacaggaaacaagggtatgagggttttttgccctaaagaaaggccagggggtcctcccgaaggaaggcttccagggggataccccctgggcccaggagtagcccctttcctccaaaggcctgggtgaaggcttttagccctttggtcctttgggaaggggcgcttttgacctccaaagccagaaggcgccttcccttcttcaagacgaagtcaacctcctggtccctttcccgccagtagtacacctcaaagcccccgtgggggccgtgggccagaaggtgggcgcccacggcggtttccacgagccgccccatgagggcggcgtccgcccacacctcctttggggaaagccccaagaccgccgtgatgagccccgtattaagggccaggagcttggggctcgaggcgcggcgccggaagggctcggcggcgtacttctgcag

SEQ ID NO: 3397 - DNA, 3026 bp, Artificial Sequence
  Description of Artificial Sequence: Synthetic DNA sequence of Thermus aquaticus DNA Polymerase D578Q
atgagggggatgctgcccctctttgagcccaagggccgggtcctcctggtggacggccaccacctggcctaccgcaccttccacgccctgaagggcctcaccaccagccggggggagccggtgcaggcggtctacggcttcgccaagagcctcctcaaggccctcaaggaggacggggacgcggtgatcgtggtctttgacgccaaggccccctccttccgccacgaggcctacggggggtacaaggcgggccgggcccccacgccggaggactttccccggcaactcgccctcatcaaggagctggtggacctcctggggctggcgcgcctcgaggtcccgggctacgaggcggacgacgtcctggccagcctggccaagaaggcggaaaaggagggctacgaggtccgcatcctcaccgccgacaaagacctttaccagctcctttccgaccgcatccacgccctccaccccgaggggtacctcatcaccccggcctggctttgggaaaagtacggcctgaggcccgaccagtgggccgactaccgggccctgaccggggacgagtccgacaaccttcccggggtcaagggcatcggggagaagacggcgaggaagcttctggaggagtgggggagcctggaagccctcctcaagaacctggaccggctgaagcccgccatccgggagaagatcctggcccacatggacgatctgaagctctcctgggacctggccaaggtgcgcaccgacctgcccctggaggtggacttcgccaaaaggcgggagcccgaccgggagaggcttagggcctttctggagaggcttgagtttggcagcctcctccacgagttcggccttctggaaagccccaaggccctggaggaggccccctggcccccgccggaaggggccttcgtgggctttgtgctttcccgcaaggagcccatgtgggccgatcttctggccctggccgccgccagggggggccgggtccaccgggcccccgagccttataaagccctcagggacctgaaggaggcgcgggggcttctcgccaaagacctgagcgttctggccctgagggaaggccttggcctcccgcccggcgacgaccccatgctcctcgcctacctcctggacccttccaacaccacccccgagggggtggcccggcgctacggcggggagtggacggaggaggcgggggagcgggccgccctttccgagaggctcttcgccaacctgtgggggaggcttgagggggaggagaggctcctttggctttaccgggaggtggagaggcccctttccgctgtcctggcccacatggaggccacgggggtgcgcctggacgtggcctatctcagggccttgtccctggaggtggccgaggagatcgcccgcctcgaggccgaggtcttccgcctggccggccaccccttcaacctcaactcccgggaccagctggaaagggtcctctttgacgagctagggcttcccgccatcggcaagacggagaagaccggcaagcgctccaccagcgccgccgtcctggaggccctccgcgaggcccaccccatcgtggagaagatcctgcagtaccgggagctcaccaagctgaagagcacctacattgaccccttgccggacctcatccaccccaggacgggccgcctccacacccgcttcaaccagacggccacggccacgggcaggctaagtagctcccaacccaacctccagaacatccccgtccgcaccccgcttgggcagaggatccgccgggccttcatcgccgaggaggggtggctattggtggccctggactatagccagatagagctcagggtgctggcccacctctccggcgacgagaacctgatccgggtcttccaggaggggcgggacatccacacggagaccgccagctggatgttcggcgtcccccgggaggccgtggaccccctgatgcgccgggcggccaagaccatcaacttcggggtcctctacggcatgtcggcccaccgcctctcccaggagctagccatcccttacgaggaggcccaggccttcattgagcgctactttcagagcttccccaaggtgcgggcctggattgagaagaccctggaggagggcaggaggcgggggtacgtggagaccctcttcggccgccgccgctacgtgccagacctagaggcccgggtgaagagcgtgcgggaggcggccgagcgcatggccttcaacatgcccgtccagggcaccgccgccgacctcatgaagctggctatggtgaagctcttccccaggctggaggaaatgggggccaggatgctccttcaggtccacgacgagctggtcctcgaggccccaaaagagagggcggaggccgtggcccggctggccaaggaggtcatggagggggtgtatcccctggccgtgcccctggaggtggaggtggggataggggaggactggctctccgccaaggagtgataccaccccatgctggcccaagccagcatgggggccccggcaaaaggtttctggggaagttaccaggcatggtgggccgaaggaaacaggaaacaagggtatgagggttttttgccctaaagaaaggccagggggtcctcccgaaggaaggcttccagggggataccccctgggcccaggagtagcccctttcctccaaaggcctgggtgaaggcttttagccctttggtcctttgggaaggggcgcttttgacctccaaagccagaaggcgccttcccttcttcaagacgaagtcaacctcctggtccctttcccgccagtagtacacctcaaagcccccgtgggggccgtgggccagaaggtgggcgcccacggcggtttccacgagccgccccatgagggcggcgtccgcccacacctcctttggggaaagccccaagaccgccgtgatgagccccgtattaagggccaggagcttggggctcgaggcgcggcgccggaagggctcggcggcgtacttctgcag

SEQ ID NO: 3398 - DNA, 3026 bp, Artificial Sequence
  Description of Artificial Sequence: Synthetic DNA sequence of Thermus aquaticus DNA Polymerase D578H
atgagggggatgctgcccctctttgagcccaagggccgggtcctcctggtggacggccaccacctggcctaccgcaccttccacgccctgaagggcctcaccaccagccggggggagccggtgcaggcggtctacggcttcgccaagagcctcctcaaggccctcaaggaggacggggacgcggtgatcgtggtctttgacgccaaggccccctccttccgccacgaggcctacggggggtacaaggcgggccgggcccccacgccggaggactttccccggcaactcgccctcatcaaggagctggtggacctcctggggctggcgcgcctcgaggtcccgggctacgaggcggacgacgtcctggccagcctggccaagaaggcggaaaaggagggctacgaggtccgcatcctcaccgccgacaaagacctttaccagctcctttccgaccgcatccacgccctccaccccgaggggtacctcatcaccccggcctggctttgggaaaagtacggcctgaggcccgaccagtgggccgactaccgggccctgaccggggacgagtccgacaaccttcccggggtcaagggcatcggggagaagacggcgaggaagcttctggaggagtgggggagcctggaagccctcctcaagaacctggaccggctgaagcccgccatccgggagaagatcctggcccacatggacgatctgaagctctcctgggacctggccaaggtgcgcaccgacctgcccctggaggtggacttcgccaaaaggcgggagcccgaccgggagaggcttagggcctttctggagaggcttgagtttggcagcctcctccacgagttcggccttctggaaagccccaaggccctggaggaggccccctggcccccgccggaaggggccttcgtgggctttgtgctttcccgcaaggagcccatgtgggccgatcttctggccctggccgccgccagggggggccgggtccaccgggcccccgagccttataaagccctcagggacctgaaggaggcgcgggggcttctcgccaaagacctgagcgttctggccctgagggaaggccttggcctcccgcccggcgacgaccccatgctcctcgcctacctcctggacccttccaacaccacccccgagggggtggcccggcgctacggcggggagtggacggaggaggcgggggagcgggccgccctttccgagaggctcttcgccaacctgtgggggaggcttgagggggaggagaggctcctttggctttaccgggaggtggagaggcccctttccgctgtcctggcccacatggaggccacgggggtgcgcctggacgtggcctatctcagggccttgtccctggaggtggccgaggagatcgcccgcctcgaggccgaggtcttccgcctggccggccaccccttcaacctcaactcccgggaccagctggaaagggtcctctttgacgagctagggcttcccgccatcggcaagacggagaagaccggcaagcgctccaccagcgccgccgtcctggaggccctccgcgaggcccaccccatcgtggagaagatcctgcagtaccgggagctcaccaagctgaagagcacctacattgaccccttgccggacctcatccaccccaggacgggccgcctccacacccgcttcaaccagacggccacggccacgggcaggctaagtagctcccatcccaacctccagaacatccccgtccgcaccccgcttgggcagaggatccgccgggccttcatcgccgaggaggggtggctattggtggccctggactatagccagatagagctcagggtgctggcccacctctccggcgacgagaacctgatccgggtcttccaggaggggcgggacatccacacggagaccgccagctggatgttcggcgtcccccgggaggccgtggaccccctgatgcgccgggcggccaagaccatcaacttcggggtcctctacggcatgtcggcccaccgcctctcccaggagctagccatcccttacgaggaggcccaggccttcattgagcgctactttcagagcttccccaaggtgcgggcctggattgagaagaccctggaggagggcaggaggcgggggtacgtggagaccctcttcggccgccgccgctacgtgccagacctagaggcccgggtgaagagcgtgcgggaggcggccgagcgcatggccttcaacatgcccgtccagggcaccgccgccgacctcatgaagctggctatggtgaagctcttccccaggctggaggaaatgggggccaggatgctccttcaggtccacgacgagctggtcctcgaggccccaaaagagagggcggaggccgtggcccggctggccaaggaggtcatggagggggtgtatcccctggccgtgcccctggaggtggaggtggggataggggaggactggctctccgccaaggagtgataccaccccatgctggcccaagccagcatgggggccccggcaaaaggtttctggggaagttaccaggcatggtgggccgaaggaaacaggaaacaagggtatgagggttttttgccctaaagaaaggccagggggtcctcccgaaggaaggcttccagggggataccccctgggcccaggagtagcccctttcctccaaaggcctgggtgaaggcttttagccctttggtcctttgggaaggggcgcttttgacctccaaagccagaaggcgccttcccttcttcaagacgaagtcaacctcctggtccctttcccgccagtagtacacctcaaagcccccgtgggggccgtgggccagaaggtgggcgcccacggcggtttccacgagccgccccatgagggcggcgtccgcccacacctcctttggggaaagccccaagaccgccgtgatgagccccgtattaagggccaggagcttggggctcgaggcgcggcgccggaagggctcggcggcgtacttctgcag

SEQ ID NO: 3399 - DNA, 3026 bp, Artificial Sequence
  Description of Artificial Sequence: Synthetic DNA sequence of Thermus aquaticus DNA Polymerase D578I
atgagggggatgctgcccctctttgagcccaagggccgggtcctcctggtggacggccaccacctggcctaccgcaccttccacgccctgaagggcctcaccaccagccggggggagccggtgcaggcggtctacggcttcgccaagagcctcctcaaggccctcaaggaggacggggacgcggtgatcgtggtctttgacgccaaggccccctccttccgccacgaggcctacggggggtacaaggcgggccgggcccccacgccggaggactttccccggcaactcgccctcatcaaggagctggtggacctcctggggctggcgcgcctcgaggtcccgggctacgaggcggacgacgtcctggccagcctggccaagaaggcggaaaaggagggctacgaggtccgcatcctcaccgccgacaaagacctttaccagctcctttccgaccgcatccacgccctccaccccgaggggtacctcatcaccccggcctggctttgggaaaagtacggcctgaggcccgaccagtgggccgactaccgggccctgaccggggacgagtccgacaaccttcccggggtcaagggcatcggggagaagacggcgaggaagcttctggaggagtgggggagcctggaagccctcctcaagaacctggaccggctgaagcccgccatccgggagaagatcctggcccacatggacgatctgaagctctcctgggacctggccaaggtgcgcaccgacctgcccctggaggtggacttcgccaaaaggcgggagcccgaccgggagaggcttagggcctttctggagaggcttgagtttggcagcctcctccacgagttcggccttctggaaagccccaaggccctggaggaggccccctggcccccgccggaaggggccttcgtgggctttgtgctttcccgcaaggagcccatgtgggccgatcttctggccctggccgccgccagggggggccgggtccaccgggcccccgagccttataaagccctcagggacctgaaggaggcgcgggggcttctcgccaaagacctgagcgttctggccctgagggaaggccttggcctcccgcccggcgacgaccccatgctcctcgcctacctcctggacccttccaacaccacccccgagggggtggcccggcgctacggcggggagtggacggaggaggcgggggagcgggccgccctttccgagaggctcttcgccaacctgtgggggaggcttgagggggaggagaggctcctttggctttaccgggaggtggagaggcccctttccgctgtcctggcccacatggaggccacgggggtgcgcctggacgtggcctatctcagggccttgtccctggaggtggccgaggagatcgcccgcctcgaggccgaggtcttccgcctggccggccaccccttcaacctcaactcccgggaccagctggaaagggtcctctttgacgagctagggcttcccgccatcggcaagacggagaagaccggcaagcgctccaccagcgccgccgtcctggaggccctccgcgaggcccaccccatcgtggagaagatcctgcagtaccgggagctcaccaagctgaagagcacctacattgaccccttgccggacctcatccaccccaggacgggccgcctccacacccgcttcaaccagacggccacggccacgggcaggctaagtagctccattcccaacctccagaacatccccgtccgcaccccgcttgggcagaggatccgccgggccttcatcgccgaggaggggtggctattggtggccctggactatagccagatagagctcagggtgctggcccacctctccggcgacgagaacctgatccgggtcttccaggaggggcgggacatccacacggagaccgccagctggatgttcggcgtcccccgggaggccgtggaccccctgatgcgccgggcggccaagaccatcaacttcggggtcctctacggcatgtcggcccaccgcctctcccaggagctagccatcccttacgaggaggcccaggccttcattgagcgctactttcagagcttccccaaggtgcgggcctggattgagaagaccctggaggagggcaggaggcgggggtacgtggagaccctcttcggccgccgccgctacgtgccagacctagaggcccgggtgaagagcgtgcgggaggcggccgagcgcatggccttcaacatgcccgtccagggcaccgccgccgacctcatgaagctggctatggtgaagctcttccccaggctggaggaaatgggggccaggatgctccttcaggtccacgacgagctggtcctcgaggccccaaaagagagggcggaggccgtggcccggctggccaaggaggtcatggagggggtgtatcccctggccgtgcccctggaggtggaggtggggataggggaggactggctctccgccaaggagtgataccaccccatgctggcccaagccagcatgggggccccggcaaaaggtttctggggaagttaccaggcatggtgggccgaaggaaacaggaaacaagggtatgagggttttttgccctaaagaaaggccagggggtcctcccgaaggaaggcttccagggggataccccctgggcccaggagtagcccctttcctccaaaggcctgggtgaaggcttttagccctttggtcctttgggaaggggcgcttttgacctccaaagccagaaggcgccttcccttcttcaagacgaagtcaacctcctggtccctttcccgccagtagtacacctcaaagcccccgtgggggccgtgggccagaaggtgggcgcccacggcggtttccacgagccgccccatgagggcggcgtccgcccacacctcctttggggaaagccccaagaccgccgtgatgagccccgtattaagggccaggagcttggggctcgaggcgcggcgccggaagggctcggcggcgtacttctgcag

SEQ ID NO: 3400 - DNA, 3026 bp, Artificial Sequence
  Description of Artificial Sequence: Synthetic DNA sequence of Thermus aquaticus DNA Polymerase D578L
atgagggggatgctgcccctctttgagcccaagggccgggtcctcctggtggacggccaccacctggcctaccgcaccttccacgccctgaagggcctcaccaccagccggggggagccggtgcaggcggtctacggcttcgccaagagcctcctcaaggccctcaaggaggacggggacgcggtgatcgtggtctttgacgccaaggccccctccttccgccacgaggcctacggggggtacaaggcgggccgggcccccacgccggaggactttccccggcaactcgccctcatcaaggagctggtggacctcctggggctggcgcgcctcgaggtcccgggctacgaggcggacgacgtcctggccagcctggccaagaaggcggaaaaggagggctacgaggtccgcatcctcaccgccgacaaagacctttaccagctcctttccgaccgcatccacgccctccaccccgaggggtacctcatcaccccggcctggctttgggaaaagtacggcctgaggcccgaccagtgggccgactaccgggccctgaccggggacgagtccgacaaccttcccggggtcaagggcatcggggagaagacggcgaggaagcttctggaggagtgggggagcctggaagccctcctcaagaacctggaccggctgaagcccgccatccgggagaagatcctggcccacatggacgatctgaagctctcctgggacctggccaaggtgcgcaccgacctgcccctggaggtggacttcgccaaaaggcgggagcccgaccgggagaggcttagggcctttctggagaggcttgagtttggcagcctcctccacgagttcggccttctggaaagccccaaggccctggaggaggccccctggcccccgccggaaggggccttcgtgggctttgtgctttcccgcaaggagcccatgtgggccgatcttctggccctggccgccgccagggggggccgggtccaccgggcccccgagccttataaagccctcagggacctgaaggaggcgcgggggcttctcgccaaagacctgagcgttctggccctgagggaaggccttggcctcccgcccggcgacgaccccatgctcctcgcctacctcctggacccttccaacaccacccccgagggggtggcccggcgctacggcggggagtggacggaggaggcgggggagcgggccgccctttccgagaggctcttcgccaacctgtgggggaggcttgagggggaggagaggctcctttggctttaccgggaggtggagaggcccctttccgctgtcctggcccacatggaggccacgggggtgcgcctggacgtggcctatctcagggccttgtccctggaggtggccgaggagatcgcccgcctcgaggccgaggtcttccgcctggccggccaccccttcaacctcaactcccgggaccagctggaaagggtcctctttgacgagctagggcttcccgccatcggcaagacggagaagaccggcaagcgctccaccagcgccgccgtcctggaggccctccgcgaggcccaccccatcgtggagaagatcctgcagtaccgggagctcaccaagctgaagagcacctacattgaccccttgccggacctcatccaccccaggacgggccgcctccacacccgcttcaaccagacggccacggccacgggcaggctaagtagctccttacccaacctccagaacatccccgtccgcaccccgcttgggcagaggatccgccgggccttcatcgccgaggaggggtggctattggtggccctggactatagccagatagagctcagggtgctggcccacctctccggcgacgagaacctgatccgggtcttccaggaggggcgggacatccacacggagaccgccagctggatgttcggcgtcccccgggaggccgtggaccccctgatgcgccgggcggccaagaccatcaacttcggggtcctctacggcatgtcggcccaccgcctctcccaggagctagccatcccttacgaggaggcccaggccttcattgagcgctactttcagagcttccccaaggtgcgggcctggattgagaagaccctggaggagggcaggaggcgggggtacgtggagaccctcttcggccgccgccgctacgtgccagacctagaggcccgggtgaagagcgtgcgggaggcggccgagcgcatggccttcaacatgcccgtccagggcaccgccgccgacctcatgaagctggctatggtgaagctcttccccaggctggaggaaatgggggccaggatgctccttcaggtccacgacgagctggtcctcgaggccccaaaagagagggcggaggccgtggcccggctggccaaggaggtcatggagggggtgtatcccctggccgtgcccctggaggtggaggtggggataggggaggactggctctccgccaaggagtgataccaccccatgctggcccaagccagcatgggggccccggcaaaaggtttctggggaagttaccaggcatggtgggccgaaggaaacaggaaacaagggtatgagggttttttgccctaaagaaaggccagggggtcctcccgaaggaaggcttccagggggataccccctgggcccaggagtagcccctttcctccaaaggcctgggtgaaggcttttagccctttggtcctttgggaaggggcgcttttgacctccaaagccagaaggcgccttcccttcttcaagacgaagtcaacctcctggtccctttcccgccagtagtacacctcaaagcccccgtgggggccgtgggccagaaggtgggcgcccacggcggtttccacgagccgccccatgagggcggcgtccgcccacacctcctttggggaaagccccaagaccgccgtgatgagccccgtattaagggccaggagcttggggctcgaggcgcggcgccggaagggctcggcggcgtacttctgcag

SEQ ID NO: 3401 - DNA, 3026 bp, Artificial Sequence
  Description of Artificial Sequence: Synthetic DNA sequence of Thermus aquaticus DNA Polymerase D578K
atgagggggatgctgcccctctttgagcccaagggccgggtcctcctggtggacggccaccacctggcctaccgcaccttccacgccctgaagggcctcaccaccagccggggggagccggtgcaggcggtctacggcttcgccaagagcctcctcaaggccctcaaggaggacggggacgcggtgatcgtggtctttgacgccaaggccccctccttccgccacgaggcctacggggggtacaaggcgggccgggcccccacgccggaggactttccccggcaactcgccctcatcaaggagctggtggacctcctggggctggcgcgcctcgaggtcccgggctacgaggcggacgacgtcctggccagcctggccaagaaggcggaaaaggagggctacgaggtccgcatcctcaccgccgacaaagacctttaccagctcctttccgaccgcatccacgccctccaccccgaggggtacctcatcaccccggcctggctttgggaaaagtacggcctgaggcccgaccagtgggccgactaccgggccctgaccggggacgagtccgacaaccttcccggggtcaagggcatcggggagaagacggcgaggaagcttctggaggagtgggggagcctggaagccctcctcaagaacctggaccggctgaagcccgccatccgggagaagatcctggcccacatggacgatctgaagctctcctgggacctggccaaggtgcgcaccgacctgcccctggaggtggacttcgccaaaaggcgggagcccgaccgggagaggcttagggcctttctggagaggcttgagtttggcagcctcctccacgagttcggccttctggaaagccccaaggccctggaggaggccccctggcccccgccggaaggggccttcgtgggctttgtgctttcccgcaaggagcccatgtgggccgatcttctggccctggccgccgccagggggggccgggtccaccgggcccccgagccttataaagccctcagggacctgaaggaggcgcgggggcttctcgccaaagacctgagcgttctggccctgagggaaggccttggcctcccgcccggcgacgaccccatgctcctcgcctacctcctggacccttccaacaccacccccgagggggtggcccggcgctacggcggggagtggacggaggaggcgggggagcgggccgccctttccgagaggctcttcgccaacctgtgggggaggcttgagggggaggagaggctcctttggctttaccgggaggtggagaggcccctttccgctgtcctggcccacatggaggccacgggggtgcgcctggacgtggcctatctcagggccttgtccctggaggtggccgaggagatcgcccgcctcgaggccgaggtcttccgcctggccggccaccccttcaacctcaactcccgggaccagctggaaagggtcctctttgacgagctagggcttcccgccatcggcaagacggagaagaccggcaagcgctccaccagcgccgccgtcctggaggccctccgcgaggcccaccccatcgtggagaagatcctgcagtaccgggagctcaccaagctgaagagcacctacattgaccccttgccggacctcatccaccccaggacgggccgcctccacacccgcttcaaccagacggccacggccacgggcaggctaagtagctccaaacccaacctccagaacatccccgtccgcaccccgcttgggcagaggatccgccgggccttcatcgccgaggaggggtggctattggtggccctggactatagccagatagagctcagggtgctggcccacctctccggcgacgagaacctgatccgggtcttccaggaggggcgggacatccacacggagaccgccagctggatgttcggcgtcccccgggaggccgtggaccccctgatgcgccgggcggccaagaccatcaacttcggggtcctctacggcatgtcggcccaccgcctctcccaggagctagccatcccttacgaggaggcccaggccttcattgagcgctactttcagagcttccccaaggtgcgggcctggattgagaagaccctggaggagggcaggaggcgggggtacgtggagaccctcttcggccgccgccgctacgtgccagacctagaggcccgggtgaagagcgtgcgggaggcggccgagcgcatggccttcaacatgcccgtccagggcaccgccgccgacctcatgaagctggctatggtgaagctcttccccaggctggaggaaatgggggccaggatgctccttcaggtccacgacgagctggtcctcgaggccccaaaagagagggcggaggccgtggcccggctggccaaggaggtcatggagggggtgtatcccctggccgtgcccctggaggtggaggtggggataggggaggactggctctccgccaaggagtgataccaccccatgctggcccaagccagcatgggggccccggcaaaaggtttctggggaagttaccaggcatggtgggccgaaggaaacaggaaacaagggtatgagggttttttgccctaaagaaaggccagggggtcctcccgaaggaaggcttccagggggataccccctgggcccaggagtagcccctttcctccaaaggcctgggtgaaggcttttagccctttggtcctttgggaaggggcgcttttgacctccaaagccagaaggcgccttcccttcttcaagacgaagtcaacctcctggtccctttcccgccagtagtacacctcaaagcccccgtgggggccgtgggccagaaggtgggcgcccacggcggtttccacgagccgccccatgagggcggcgtccgcccacacctcctttggggaaagccccaagaccgccgtgatgagccccgtattaagggccaggagcttggggctcgaggcgcggcgccggaagggctcggcggcgtacttctgcag

SEQ ID NO: 3402 - DNA, 3026 bp, Artificial Sequence
  Description of Artificial Sequence: Synthetic DNA sequence of Thermus aquaticus DNA Polymerase D578E
atgagggggatgctgcccctctttgagcccaagggccgggtcctcctggtggacggccaccacctggcctaccgcaccttccacgccctgaagggcctcaccaccagccggggggagccggtgcaggcggtctacggcttcgccaagagcctcctcaaggccctcaaggaggacggggacgcggtgatcgtggtctttgacgccaaggccccctccttccgccacgaggcctacggggggtacaaggcgggccgggcccccacgccggaggactttccccggcaactcgccctcatcaaggagctggtggacctcctggggctggcgcgcctcgaggtcccgggctacgaggcggacgacgtcctggccagcctggccaagaaggcggaaaaggagggctacgaggtccgcatcctcaccgccgacaaagacctttaccagctcctttccgaccgcatccacgccctccaccccgaggggtacctcatcaccccggcctggctttgggaaaagtacggcctgaggcccgaccagtgggccgactaccgggccctgaccggggacgagtccgacaaccttcccggggtcaagggcatcggggagaagacggcgaggaagcttctggaggagtgggggagcctggaagccctcctcaagaacctggaccggctgaagcccgccatccgggagaagatcctggcccacatggacgatctgaagctctcctgggacctggccaaggtgcgcaccgacctgcccctggaggtggacttcgccaaaaggcgggagcccgaccgggagaggcttagggcctttctggagaggcttgagtttggcagcctcctccacgagttcggccttctggaaagccccaaggccctggaggaggccccctggcccccgccggaaggggccttcgtgggctttgtgctttcccgcaaggagcccatgtgggccgatcttctggccctggccgccgccagggggggccgggtccaccgggcccccgagccttataaagccctcagggacctgaaggaggcgcgggggcttctcgccaaagacctgagcgttctggccctgagggaaggccttggcctcccgcccggcgacgaccccatgctcctcgcctacctcctggacccttccaacaccacccccgagggggtggcccggcgctacggcggggagtggacggaggaggcgggggagcgggccgccctttccgagaggctcttcgccaacctgtgggggaggcttgagggggaggagaggctcctttggctttaccgggaggtggagaggcccctttccgctgtcctggcccacatggaggccacgggggtgcgcctggacgtggcctatctcagggccttgtccctggaggtggccgaggagatcgcccgcctcgaggccgaggtcttccgcctggccggccaccccttcaacctcaactcccgggaccagctggaaagggtcctctttgacgagctagggcttcccgccatcggcaagacggagaagaccggcaagcgctccaccagcgccgccgtcctggaggccctccgcgaggcccaccccatcgtggagaagatcctgcagtaccgggagctcaccaagctgaagagcacctacattgaccccttgccggacctcatccaccccaggacgggccgcctccacacccgcttcaaccagacggccacggccacgggcaggctaagtagctccgaacccaacctccagaacatccccgtccgcaccccgcttgggcagaggatccgccgggccttcatcgccgaggaggggtggctattggtggccctggactatagccagatagagctcagggtgctggcccacctctccggcgacgagaacctgatccgggtcttccaggaggggcgggacatccacacggagaccgccagctggatgttcggcgtcccccgggaggccgtggaccccctgatgcgccgggcggccaagaccatcaacttcggggtcctctacggcatgtcggcccaccgcctctcccaggagctagccatcccttacgaggaggcccaggccttcattgagcgctactttcagagcttccccaaggtgcgggcctggattgagaagaccctggaggagggcaggaggcgggggtacgtggagaccctcttcggccgccgccgctacgtgccagacctagaggcccgggtgaagagcgtgcgggaggcggccgagcgcatggccttcaacatgcccgtccagggcaccgccgccgacctcatgaagctggctatggtgaagctcttccccaggctggaggaaatgggggccaggatgctccttcaggtccacgacgagctggtcctcgaggccccaaaagagagggcggaggccgtggcccggctggccaaggaggtcatggagggggtgtatcccctggccgtgcccctggaggtggaggtggggataggggaggactggctctccgccaaggagtgataccaccccatgctggcccaagccagcatgggggccccggcaaaaggtttctggggaagttaccaggcatggtgggccgaaggaaacaggaaacaagggtatgagggttttttgccctaaagaaaggccagggggtcctcccgaaggaaggcttccagggggataccccctgggcccaggagtagcccctttcctccaaaggcctgggtgaaggcttttagccctttggtcctttgggaaggggcgcttttgacctccaaagccagaaggcgccttcccttcttcaagacgaagtcaacctcctggtccctttcccgccagtagtacacctcaaagcccccgtgggggccgtgggccagaaggtgggcgcccacggcggtttccacgagccgccccatgagggcggcgtccgcccacacctcctttggggaaagccccaagaccgccgtgatgagccccgtattaagggccaggagcttggggctcgaggcgcggcgccggaagggctcggcggcgtacttctgcag

SEQ ID NO: 3403 - DNA, 3026 bp, Artificial Sequence
  Description of Artificial Sequence: Synthetic DNA sequence of Thermus aquaticus DNA Polymerase D578F
atgagggggatgctgcccctctttgagcccaagggccgggtcctcctggtggacggccaccacctggcctaccgcaccttccacgccctgaagggcctcaccaccagccggggggagccggtgcaggcggtctacggcttcgccaagagcctcctcaaggccctcaaggaggacggggacgcggtgatcgtggtctttgacgccaaggccccctccttccgccacgaggcctacggggggtacaaggcgggccgggcccccacgccggaggactttccccggcaactcgccctcatcaaggagctggtggacctcctggggctggcgcgcctcgaggtcccgggctacgaggcggacgacgtcctggccagcctggccaagaaggcggaaaaggagggctacgaggtccgcatcctcaccgccgacaaagacctttaccagctcctttccgaccgcatccacgccctccaccccgaggggtacctcatcaccccggcctggctttgggaaaagtacggcctgaggcccgaccagtgggccgactaccgggccctgaccggggacgagtccgacaaccttcccggggtcaagggcatcggggagaagacggcgaggaagcttctggaggagtgggggagcctggaagccctcctcaagaacctggaccggctgaagcccgccatccgggagaagatcctggcccacatggacgatctgaagctctcctgggacctggccaaggtgcgcaccgacctgcccctggaggtggacttcgccaaaaggcgggagcccgaccgggagaggcttagggcctttctggagaggcttgagtttggcagcctcctccacgagttcggccttctggaaagccccaaggccctggaggaggccccctggcccccgccggaaggggccttcgtgggctttgtgctttcccgcaaggagcccatgtgggccgatcttctggccctggccgccgccagggggggccgggtccaccgggcccccgagccttataaagccctcagggacctgaaggaggcgcgggggcttctcgccaaagacctgagcgttctggccctgagggaaggccttggcctcccgcccggcgacgaccccatgctcctcgcctacctcctggacccttccaacaccacccccgagggggtggcccggcgctacggcggggagtggacggaggaggcgggggagcgggccgccctttccgagaggctcttcgccaacctgtgggggaggcttgagggggaggagaggctcctttggctttaccgggaggtggagaggcccctttccgctgtcctggcccacatggaggccacgggggtgcgcctggacgtggcctatctcagggccttgtccctggaggtggccgaggagatcgcccgcctcgaggccgaggtcttccgcctggccggccaccccttcaacctcaactcccgggaccagctggaaagggtcctctttgacgagctagggcttcccgccatcggcaagacggagaagaccggcaagcgctccaccagcgccgccgtcctggaggccctccgcgaggcccaccccatcgtggagaagatcctgcagtaccgggagctcaccaagctgaagagcacctacattgaccccttgccggacctcatccaccccaggacgggccgcctccacacccgcttcaaccagacggccacggccacgggcaggctaagtagctcctttcccaacctccagaacatccccgtccgcaccccgcttgggcagaggatccgccgggccttcatcgccgaggaggggtggctattggtggccctggactatagccagatagagctcagggtgctggcccacctctccggcgacgagaacctgatccgggtcttccaggaggggcgggacatccacacggagaccgccagctggatgttcggcgtcccccgggaggccgtggaccccctgatgcgccgggcggccaagaccatcaacttcggggtcctctacggcatgtcggcccaccgcctctcccaggagctagccatcccttacgaggaggcccaggccttcattgagcgctactttcagagcttccccaaggtgcgggcctggattgagaagaccctggaggagggcaggaggcgggggtacgtggagaccctcttcggccgccgccgctacgtgccagacctagaggcccgggtgaagagcgtgcgggaggcggccgagcgcatggccttcaacatgcccgtccagggcaccgccgccgacctcatgaagctggctatggtgaagctcttccccaggctggaggaaatgggggccaggatgctccttcaggtccacgacgagctggtcctcgaggccccaaaagagagggcggaggccgtggcccggctggccaaggaggtcatggagggggtgtatcccctggccgtgcccctggaggtggaggtggggataggggaggactggctctccgccaaggagtgataccaccccatgctggcccaagccagcatgggggccccggcaaaaggtttctggggaagttaccaggcatggtgggccgaaggaaacaggaaacaagggtatgagggttttttgccctaaagaaaggccagggggtcctcccgaaggaaggcttccagggggataccccctgggcccaggagtagcccctttcctccaaaggcctgggtgaaggcttttagccctttggtcctttgggaaggggcgcttttgacctccaaagccagaaggcgccttcccttcttcaagacgaagtcaacctcctggtccctttcccgccagtagtacacctcaaagcccccgtgggggccgtgggccagaaggtgggcgcccacggcggtttccacgagccgccccatgagggcggcgtccgcccacacctcctttggggaaagccccaagaccgccgtgatgagccccgtattaagggccaggagcttggggctcgaggcgcggcgccggaagggctcggcggcgtacttctgcag

SEQ ID NO: 3404 - DNA, 3026 bp, Artificial Sequence
  Description of Artificial Sequence: Synthetic DNA sequence of Thermus aquaticus DNA Polymerase D578S
atgagggggatgctgcccctctttgagcccaagggccgggtcctcctggtggacggccaccacctggcctaccgcaccttccacgccctgaagggcctcaccaccagccggggggagccggtgcaggcggtctacggcttcgccaagagcctcctcaaggccctcaaggaggacggggacgcggtgatcgtggtctttgacgccaaggccccctccttccgccacgaggcctacggggggtacaaggcgggccgggcccccacgccggaggactttccccggcaactcgccctcatcaaggagctggtggacctcctggggctggcgcgcctcgaggtcccgggctacgaggcggacgacgtcctggccagcctggccaagaaggcggaaaaggagggctacgaggtccgcatcctcaccgccgacaaagacctttaccagctcctttccgaccgcatccacgccctccaccccgaggggtacctcatcaccccggcctggctttgggaaaagtacggcctgaggcccgaccagtgggccgactaccgggccctgaccggggacgagtccgacaaccttcccggggtcaagggcatcggggagaagacggcgaggaagcttctggaggagtgggggagcctggaagccctcctcaagaacctggaccggctgaagcccgccatccgggagaagatcctggcccacatggacgatctgaagctctcctgggacctggccaaggtgcgcaccgacctgcccctggaggtggacttcgccaaaaggcgggagcccgaccgggagaggcttagggcctttctggagaggcttgagtttggcagcctcctccacgagttcggccttctggaaagccccaaggccctggaggaggccccctggcccccgccggaaggggccttcgtgggctttgtgctttcccgcaaggagcccatgtgggccgatcttctggccctggccgccgccagggggggccgggtccaccgggcccccgagccttataaagccctcagggacctgaaggaggcgcgggggcttctcgccaaagacctgagcgttctggccctgagggaaggccttggcctcccgcccggcgacgaccccatgctcctcgcctacctcctggacccttccaacaccacccccgagggggtggcccggcgctacggcggggagtggacggaggaggcgggggagcgggccgccctttccgagaggctcttcgccaacctgtgggggaggcttgagggggaggagaggctcctttggctttaccgggaggtggagaggcccctttccgctgtcctggcccacatggaggccacgggggtgcgcctggacgtggcctatctcagggccttgtccctggaggtggccgaggagatcgcccgcctcgaggccgaggtcttccgcctggccggccaccccttcaacctcaactcccgggaccagctggaaagggtcctctttgacgagctagggcttcccgccatcggcaagacggagaagaccggcaagcgctccaccagcgccgccgtcctggaggccctccgcgaggcccaccccatcgtggagaagatcctgcagtaccgggagctcaccaagctgaagagcacctacattgaccccttgccggacctcatccaccccaggacgggccgcctccacacccgcttcaaccagacggccacggccacgggcaggctaagtagctcctctcccaacctccagaacatccccgtccgcaccccgcttgggcagaggatccgccgggccttcatcgccgaggaggggtggctattggtggccctggactatagccagatagagctcagggtgctggcccacctctccggcgacgagaacctgatccgggtcttccaggaggggcgggacatccacacggagaccgccagctggatgttcggcgtcccccgggaggccgtggaccccctgatgcgccgggcggccaagaccatcaacttcggggtcctctacggcatgtcggcccaccgcctctcccaggagctagccatcccttacgaggaggcccaggccttcattgagcgctactttcagagcttccccaaggtgcgggcctggattgagaagaccctggaggagggcaggaggcgggggtacgtggagaccctcttcggccgccgccgctacgtgccagacctagaggcccgggtgaagagcgtgcgggaggcggccgagcgcatggccttcaacatgcccgtccagggcaccgccgccgacctcatgaagctggctatggtgaagctcttccccaggctggaggaaatgggggccaggatgctccttcaggtccacgacgagctggtcctcgaggccccaaaagagagggcggaggccgtggcccggctggccaaggaggtcatggagggggtgtatcccctggccgtgcccctggaggtggaggtggggataggggaggactggctctccgccaaggagtgataccaccccatgctggcccaagccagcatgggggccccggcaaaaggtttctggggaagttaccaggcatggtgggccgaaggaaacaggaaacaagggtatgagggttttttgccctaaagaaaggccagggggtcctcccgaaggaaggcttccagggggataccccctgggcccaggagtagcccctttcctccaaaggcctgggtgaaggcttttagccctttggtcctttgggaaggggcgcttttgacctccaaagccagaaggcgccttcccttcttcaagacgaagtcaacctcctggtccctttcccgccagtagtacacctcaaagcccccgtgggggccgtgggccagaaggtgggcgcccacggcggtttccacgagccgccccatgagggcggcgtccgcccacacctcctttggggaaagccccaagaccgccgtgatgagccccgtattaagggccaggagcttggggctcgaggcgcggcgccggaagggctcggcggcgtacttctgcag

SEQ ID NO: 3405 - DNA, 3026 bp, Artificial Sequence
  Description of Artificial Sequence: Synthetic DNA sequence of Thermus aquaticus DNA Polymerase D578Y
atgagggggatgctgcccctctttgagcccaagggccgggtcctcctggtggacggccaccacctggcctaccgcaccttccacgccctgaagggcctcaccaccagccggggggagccggtgcaggcggtctacggcttcgccaagagcctcctcaaggccctcaaggaggacggggacgcggtgatcgtggtctttgacgccaaggccccctccttccgccacgaggcctacggggggtacaaggcgggccgggcccccacgccggaggactttccccggcaactcgccctcatcaaggagctggtggacctcctggggctggcgcgcctcgaggtcccgggctacgaggcggacgacgtcctggccagcctggccaagaaggcggaaaaggagggctacgaggtccgcatcctcaccgccgacaaagacctttaccagctcctttccgaccgcatccacgccctccaccccgaggggtacctcatcaccccggcctggctttgggaaaagtacggcctgaggcccgaccagtgggccgactaccgggccctgaccggggacgagtccgacaaccttcccggggtcaagggcatcggggagaagacggcgaggaagcttctggaggagtgggggagcctggaagccctcctcaagaacctggaccggctgaagcccgccatccgggagaagatcctggcccacatggacgatctgaagctctcctgggacctggccaaggtgcgcaccgacctgcccctggaggtggacttcgccaaaaggcgggagcccgaccgggagaggcttagggcctttctggagaggcttgagtttggcagcctcctccacgagttcggccttctggaaagccccaaggccctggaggaggccccctggcccccgccggaaggggccttcgtgggctttgtgctttcccgcaaggagcccatgtgggccgatcttctggccctggccgccgccagggggggccgggtccaccgggcccccgagccttataaagccctcagggacctgaaggaggcgcgggggcttctcgccaaagacctgagcgttctggccctgagggaaggccttggcctcccgcccggcgacgaccccatgctcctcgcctacctcctggacccttccaacaccacccccgagggggtggcccggcgctacggcggggagtggacggaggaggcgggggagcgggccgccctttccgagaggctcttcgccaacctgtgggggaggcttgagggggaggagaggctcctttggctttaccgggaggtggagaggcccctttccgctgtcctggcccacatggaggccacgggggtgcgcctggacgtggcctatctcagggccttgtccctggaggtggccgaggagatcgcccgcctcgaggccgaggtcttccgcctggccggccaccccttcaacctcaactcccgggaccagctggaaagggtcctctttgacgagctagggcttcccgccatcggcaagacggagaagaccggcaagcgctccaccagcgccgccgtcctggaggccctccgcgaggcccaccccatcgtggagaagatcctgcagtaccgggagctcaccaagctgaagagcacctacattgaccccttgccggacctcatccaccccaggacgggccgcctccacacccgcttcaaccagacggccacggccacgggcaggctaagtagctcctatcccaacctccagaacatccccgtccgcaccccgcttgggcagaggatccgccgggccttcatcgccgaggaggggtggctattggtggccctggactatagccagatagagctcagggtgctggcccacctctccggcgacgagaacctgatccgggtcttccaggaggggcgggacatccacacggagaccgccagctggatgttcggcgtcccccgggaggccgtggaccccctgatgcgccgggcggccaagaccatcaacttcggggtcctctacggcatgtcggcccaccgcctctcccaggagctagccatcccttacgaggaggcccaggccttcattgagcgctactttcagagcttccccaaggtgcgggcctggattgagaagaccctggaggagggcaggaggcgggggtacgtggagaccctcttcggccgccgccgctacgtgccagacctagaggcccgggtgaagagcgtgcgggaggcggccgagcgcatggccttcaacatgcccgtccagggcaccgccgccgacctcatgaagctggctatggtgaagctcttccccaggctggaggaaatgggggccaggatgctccttcaggtccacgacgagctggtcctcgaggccccaaaagagagggcggaggccgtggcccggctggccaaggaggtcatggagggggtgtatcccctggccgtgcccctggaggtggaggtggggataggggaggactggctctccgccaaggagtgataccaccccatgctggcccaagccagcatgggggccccggcaaaaggtttctggggaagttaccaggcatggtgggccgaaggaaacaggaaacaagggtatgagggttttttgccctaaagaaaggccagggggtcctcccgaaggaaggcttccagggggataccccctgggcccaggagtagcccctttcctccaaaggcctgggtgaaggcttttagccctttggtcctttgggaaggggcgcttttgacctccaaagccagaaggcgccttcccttcttcaagacgaagtcaacctcctggtccctttcccgccagtagtacacctcaaagcccccgtgggggccgtgggccagaaggtgggcgcccacggcggtttccacgagccgccccatgagggcggcgtccgcccacacctcctttggggaaagccccaagaccgccgtgatgagccccgtattaagggccaggagcttggggctcgaggcgcggcgccggaagggctcggcggcgtacttctgcag

SEQ ID NO: 3406 - DNA, 3026 bp, Artificial Sequence
  Description of Artificial Sequence: Synthetic DNA sequence of Thermus aquaticus DNA Polymerase D578W
atgagggggatgctgcccctctttgagcccaagggccgggtcctcctggtggacggccaccacctggcctaccgcaccttccacgccctgaagggcctcaccaccagccggggggagccggtgcaggcggtctacggcttcgccaagagcctcctcaaggccctcaaggaggacggggacgcggtgatcgtggtctttgacgccaaggccccctccttccgccacgaggcctacggggggtacaaggcgggccgggcccccacgccggaggactttccccggcaactcgccctcatcaaggagctggtggacctcctggggctggcgcgcctcgaggtcccgggctacgaggcggacgacgtcctggccagcctggccaagaaggcggaaaaggagggctacgaggtccgcatcctcaccgccgacaaagacctttaccagctcctttccgaccgcatccacgccctccaccccgaggggtacctcatcaccccggcctggctttgggaaaagtacggcctgaggcccgaccagtgggccgactaccgggccctgaccggggacgagtccgacaaccttcccggggtcaagggcatcggggagaagacggcgaggaagcttctggaggagtgggggagcctggaagccctcctcaagaacctggaccggctgaagcccgccatccgggagaagatcctggcccacatggacgatctgaagctctcctgggacctggccaaggtgcgcaccgacctgcccctggaggtggacttcgccaaaaggcgggagcccgaccgggagaggcttagggcctttctggagaggcttgagtttggcagcctcctccacgagttcggccttctggaaagccccaaggccctggaggaggccccctggcccccgccggaaggggccttcgtgggctttgtgctttcccgcaaggagcccatgtgggccgatcttctggccctggccgccgccagggggggccgggtccaccgggcccccgagccttataaagccctcagggacctgaaggaggcgcgggggcttctcgccaaagacctgagcgttctggccctgagggaaggccttggcctcccgcccggcgacgaccccatgctcctcgcctacctcctggacccttccaacaccacccccgagggggtggcccggcgctacggcggggagtggacggaggaggcgggggagcgggccgccctttccgagaggctcttcgccaacctgtgggggaggcttgagggggaggagaggctcctttggctttaccgggaggtggagaggcccctttccgctgtcctggcccacatggaggccacgggggtgcgcctggacgtggcctatctcagggccttgtccctggaggtggccgaggagatcgcccgcctcgaggccgaggtcttccgcctggccggccaccccttcaacctcaactcccgggaccagctggaaagggtcctctttgacgagctagggcttcccgccatcggcaagacggagaagaccggcaagcgctccaccagcgccgccgtcctggaggccctccgcgaggcccaccccatcgtggagaagatcctgcagtaccgggagctcaccaagctgaagagcacctacattgaccccttgccggacctcatccaccccaggacgggccgcctccacacccgcttcaaccagacggccacggccacgggcaggctaagtagctcctggcccaacctccagaacatccccgtccgcaccccgcttgggcagaggatccgccgggccttcatcgccgaggaggggtggctattggtggccctggactatagccagatagagctcagggtgctggcccacctctccggcgacgagaacctgatccgggtcttccaggaggggcgggacatccacacggagaccgccagctggatgttcggcgtcccccgggaggccgtggaccccctgatgcgccgggcggccaagaccatcaacttcggggtcctctacggcatgtcggcccaccgcctctcccaggagctagccatcccttacgaggaggcccaggccttcattgagcgctactttcagagcttccccaaggtgcgggcctggattgagaagaccctggaggagggcaggaggcgggggtacgtggagaccctcttcggccgccgccgctacgtgccagacctagaggcccgggtgaagagcgtgcgggaggcggccgagcgcatggccttcaacatgcccgtccagggcaccgccgccgacctcatgaagctggctatggtgaagctcttccccaggctggaggaaatgggggccaggatgctccttcaggtccacgacgagctggtcctcgaggccccaaaagagagggcggaggccgtggcccggctggccaaggaggtcatggagggggtgtatcccctggccgtgcccctggaggtggaggtggggataggggaggactggctctccgccaaggagtgataccaccccatgctggcccaagccagcatgggggccccggcaaaaggtttctggggaagttaccaggcatggtgggccgaaggaaacaggaaacaagggtatgagggttttttgccctaaagaaaggccagggggtcctcccgaaggaaggcttccagggggataccccctgggcccaggagtagcccctttcctccaaaggcctgggtgaaggcttttagccctttggtcctttgggaaggggcgcttttgacctccaaagccagaaggcgccttcccttcttcaagacgaagtcaacctcctggtccctttcccgccagtagtacacctcaaagcccccgtgggggccgtgggccagaaggtgggcgcccacggcggtttccacgagccgccccatgagggcggcgtccgcccacacctcctttggggaaagccccaagaccgccgtgatgagccccgtattaagggccaggagcttggggctcgaggcgcggcgccggaagggctcggcggcgtacttctgcag

SEQ ID NO: 3407 - DNA, 3026 bp, Artificial Sequence
  Description of Artificial Sequence: Synthetic DNA sequence of Thermus aquaticus DNA Polymerase D578P
atgagggggatgctgcccctctttgagcccaagggccgggtcctcctggtggacggccaccacctggcctaccgcaccttccacgccctgaagggcctcaccaccagccggggggagccggtgcaggcggtctacggcttcgccaagagcctcctcaaggccctcaaggaggacggggacgcggtgatcgtggtctttgacgccaaggccccctccttccgccacgaggcctacggggggtacaaggcgggccgggcccccacgccggaggactttccccggcaactcgccctcatcaaggagctggtggacctcctggggctggcgcgcctcgaggtcccgggctacgaggcggacgacgtcctggccagcctggccaagaaggcggaaaaggagggctacgaggtccgcatcctcaccgccgacaaagacctttaccagctcctttccgaccgcatccacgccctccaccccgaggggtacctcatcaccccggcctggctttgggaaaagtacggcctgaggcccgaccagtgggccgactaccgggccctgaccggggacgagtccgacaaccttcccggggtcaagggcatcggggagaagacggcgaggaagcttctggaggagtgggggagcctggaagccctcctcaagaacctggaccggctgaagcccgccatccgggagaagatcctggcccacatggacgatctgaagctctcctgggacctggccaaggtgcgcaccgacctgcccctggaggtggacttcgccaaaaggcgggagcccgaccgggagaggcttagggcctttctggagaggcttgagtttggcagcctcctccacgagttcggccttctggaaagccccaaggccctggaggaggccccctggcccccgccggaaggggccttcgtgggctttgtgctttcccgcaaggagcccatgtgggccgatcttctggccctggccgccgccagggggggccgggtccaccgggcccccgagccttataaagccctcagggacctgaaggaggcgcgggggcttctcgccaaagacctgagcgttctggccctgagggaaggccttggcctcccgcccggcgacgaccccatgctcctcgcctacctcctggacccttccaacaccacccccgagggggtggcccggcgctacggcggggagtggacggaggaggcgggggagcgggccgccctttccgagaggctcttcgccaacctgtgggggaggcttgagggggaggagaggctcctttggctttaccgggaggtggagaggcccctttccgctgtcctggcccacatggaggccacgggggtgcgcctggacgtggcctatctcagggccttgtccctggaggtggccgaggagatcgcccgcctcgaggccgaggtcttccgcctggccggccaccccttcaacctcaactcccgggaccagctggaaagggtcctctttgacgagctagggcttcccgccatcggcaagacggagaagaccggcaagcgctccaccagcgccgccgtcctggaggccctccgcgaggcccaccccatcgtggagaagatcctgcagtaccgggagctcaccaagctgaagagcacctacattgaccccttgccggacctcatccaccccaggacgggccgcctccacacccgcttcaaccagacggccacggccacgggcaggctaagtagctcccctcccaacctccagaacatccccgtccgcaccccgcttgggcagaggatccgccgggccttcatcgccgaggaggggtggctattggtggccctggactatagccagatagagctcagggtgctggcccacctctccggcgacgagaacctgatccgggtcttccaggaggggcgggacatccacacggagaccgccagctggatgttcggcgtcccccgggaggccgtggaccccctgatgcgccgggcggccaagaccatcaacttcggggtcctctacggcatgtcggcccaccgcctctcccaggagctagccatcccttacgaggaggcccaggccttcattgagcgctactttcagagcttccccaaggtgcgggcctggattgagaagaccctggaggagggcaggaggcgggggtacgtggagaccctcttcggccgccgccgctacgtgccagacctagaggcccgggtgaagagcgtgcgggaggcggccgagcgcatggccttcaacatgcccgtccagggcaccgccgccgacctcatgaagctggctatggtgaagctcttccccaggctggaggaaatgggggccaggatgctccttcaggtccacgacgagctggtcctcgaggccccaaaagagagggcggaggccgtggcccggctggccaaggaggtcatggagggggtgtatcccctggccgtgcccctggaggtggaggtggggataggggaggactggctctccgccaaggagtgataccaccccatgctggcccaagccagcatgggggccccggcaaaaggtttctggggaagttaccaggcatggtgggccgaaggaaacaggaaacaagggtatgagggttttttgccctaaagaaaggccagggggtcctcccgaaggaaggcttccagggggataccccctgggcccaggagtagcccctttcctccaaaggcctgggtgaaggcttttagccctttggtcctttgggaaggggcgcttttgacctccaaagccagaaggcgccttcccttcttcaagacgaagtcaacctcctggtccctttcccgccagtagtacacctcaaagcccccgtgggggccgtgggccagaaggtgggcgcccacggcggtttccacgagccgccccatgagggcggcgtccgcccacacctcctttggggaaagccccaagaccgccgtgatgagccccgtattaagggccaggagcttggggctcgaggcgcggcgccggaagggctcggcggcgtacttctgcag

SEQ ID NO: 3408 - DNA, 3026 bp, Artificial Sequence
  Description of Artificial Sequence: Synthetic DNA sequence of Thermus aquaticus DNA Polymerase D578M
atgagggggatgctgcccctctttgagcccaagggccgggtcctcctggtggacggccaccacctggcctaccgcaccttccacgccctgaagggcctcaccaccagccggggggagccggtgcaggcggtctacggcttcgccaagagcctcctcaaggccctcaaggaggacggggacgcggtgatcgtggtctttgacgccaaggccccctccttccgccacgaggcctacggggggtacaaggcgggccgggcccccacgccggaggactttccccggcaactcgccctcatcaaggagctggtggacctcctggggctggcgcgcctcgaggtcccgggctacgaggcggacgacgtcctggccagcctggccaagaaggcggaaaaggagggctacgaggtccgcatcctcaccgccgacaaagacctttaccagctcctttccgaccgcatccacgccctccaccccgaggggtacctcatcaccccggcctggctttgggaaaagtacggcctgaggcccgaccagtgggccgactaccgggccctgaccggggacgagtccgacaaccttcccggggtcaagggcatcggggagaagacggcgaggaagcttctggaggagtgggggagcctggaagccctcctcaagaacctggaccggctgaagcccgccatccgggagaagatcctggcccacatggacgatctgaagctctcctgggacctggccaaggtgcgcaccgacctgcccctggaggtggacttcgccaaaaggcgggagcccgaccgggagaggcttagggcctttctggagaggcttgagtttggcagcctcctccacgagttcggccttctggaaagccccaaggccctggaggaggccccctggcccccgccggaaggggccttcgtgggctttgtgctttcccgcaaggagcccatgtgggccgatcttctggccctggccgccgccagggggggccgggtccaccgggcccccgagccttataaagccctcagggacctgaaggaggcgcgggggcttctcgccaaagacctgagcgttctggccctgagggaaggccttggcctcccgcccggcgacgaccccatgctcctcgcctacctcctggacccttccaacaccacccccgagggggtggcccggcgctacggcggggagtggacggaggaggcgggggagcgggccgccctttccgagaggctcttcgccaacctgtgggggaggcttgagggggaggagaggctcctttggctttaccgggaggtggagaggcccctttccgctgtcctggcccacatggaggccacgggggtgcgcctggacgtggcctatctcagggccttgtccctggaggtggccgaggagatcgcccgcctcgaggccgaggtcttccgcctggccggccaccccttcaacctcaactcccgggaccagctggaaagggtcctctttgacgagctagggcttcccgccatcggcaagacggagaagaccggcaagcgctccaccagcgccgccgtcctggaggccctccgcgaggcccaccccatcgtggagaagatcctgcagtaccgggagctcaccaagctgaagagcacctacattgaccccttgccggacctcatccaccccaggacgggccgcctccacacccgcttcaaccagacggccacggccacgggcaggctaagtagctccatgcccaacctccagaacatccccgtccgcaccccgcttgggcagaggatccgccgggccttcatcgccgaggaggggtggctattggtggccctggactatagccagatagagctcagggtgctggcccacctctccggcgacgagaacctgatccgggtcttccaggaggggcgggacatccacacggagaccgccagctggatgttcggcgtcccccgggaggccgtggaccccctgatgcgccgggcggccaagaccatcaacttcggggtcctctacggcatgtcggcccaccgcctctcccaggagctagccatcccttacgaggaggcccaggccttcattgagcgctactttcagagcttccccaaggtgcgggcctggattgagaagaccctggaggagggcaggaggcgggggtacgtggagaccctcttcggccgccgccgctacgtgccagacctagaggcccgggtgaagagcgtgcgggaggcggccgagcgcatggccttcaacatgcccgtccagggcaccgccgccgacctcatgaagctggctatggtgaagctcttccccaggctggaggaaatgggggccaggatgctccttcaggtccacgacgagctggtcctcgaggccccaaaagagagggcggaggccgtggcccggctggccaaggaggtcatggagggggtgtatcccctggccgtgcccctggaggtggaggtggggataggggaggactggctctccgccaaggagtgataccaccccatgctggcccaagccagcatgggggccccggcaaaaggtttctggggaagttaccaggcatggtgggccgaaggaaacaggaaacaagggtatgagggttttttgccctaaagaaaggccagggggtcctcccgaaggaaggcttccagggggataccccctgggcccaggagtagcccctttcctccaaaggcctgggtgaaggcttttagccctttggtcctttgggaaggggcgcttttgacctccaaagccagaaggcgccttcccttcttcaagacgaagtcaacctcctggtccctttcccgccagtagtacacctcaaagcccccgtgggggccgtgggccagaaggtgggcgcccacggcggtttccacgagccgccccatgagggcggcgtccgcccacacctcctttggggaaagccccaagaccgccgtgatgagccccgtattaagggccaggagcttggggctcgaggcgcggcgccggaagggctcggcggcgtacttctgcag

SEQ ID NO: 3409 - DNA, 3026 bp, Artificial Sequence
  Description of Artificial Sequence: Synthetic DNA sequence of Thermus aquaticus DNA Polymerase D578T
atgagggggatgctgcccctctttgagcccaagggccgggtcctcctggtggacggccaccacctggcctaccgcaccttccacgccctgaagggcctcaccaccagccggggggagccggtgcaggcggtctacggcttcgccaagagcctcctcaaggccctcaaggaggacggggacgcggtgatcgtggtctttgacgccaaggccccctccttccgccacgaggcctacggggggtacaaggcgggccgggcccccacgccggaggactttccccggcaactcgccctcatcaaggagctggtggacctcctggggctggcgcgcctcgaggtcccgggctacgaggcggacgacgtcctggccagcctggccaagaaggcggaaaaggagggctacgaggtccgcatcctcaccgccgacaaagacctttaccagctcctttccgaccgcatccacgccctccaccccgaggggtacctcatcaccccggcctggctttgggaaaagtacggcctgaggcccgaccagtgggccgactaccgggccctgaccggggacgagtccgacaaccttcccggggtcaagggcatcggggagaagacggcgaggaagcttctggaggagtgggggagcctggaagccctcctcaagaacctggaccggctgaagcccgccatccgggagaagatcctggcccacatggacgatctgaagctctcctgggacctggccaaggtgcgcaccgacctgcccctggaggtggacttcgccaaaaggcgggagcccgaccgggagaggcttagggcctttctggagaggcttgagtttggcagcctcctccacgagttcggccttctggaaagccccaaggccctggaggaggccccctggcccccgccggaaggggccttcgtgggctttgtgctttcccgcaaggagcccatgtgggccgatcttctggccctggccgccgccagggggggccgggtccaccgggcccccgagccttataaagccctcagggacctgaaggaggcgcgggggcttctcgccaaagacctgagcgttctggccctgagggaaggccttggcctcccgcccggcgacgaccccatgctcctcgcctacctcctggacccttccaacaccacccccgagggggtggcccggcgctacggcggggagtggacggaggaggcgggggagcgggccgccctttccgagaggctcttcgccaacctgtgggggaggcttgagggggaggagaggctcctttggctttaccgggaggtggagaggcccctttccgctgtcctggcccacatggaggccacgggggtgcgcctggacgtggcctatctcagggccttgtccctggaggtggccgaggagatcgcccgcctcgaggccgaggtcttccgcctggccggccaccccttcaacctcaactcccgggaccagctggaaagggtcctctttgacgagctagggcttcccgccatcggcaagacggagaagaccggcaagcgctccaccagcgccgccgtcctggaggccctccgcgaggcccaccccatcgtggagaagatcctgcagtaccgggagctcaccaagctgaagagcacctacattgaccccttgccggacctcatccaccccaggacgggccgcctccacacccgcttcaaccagacggccacggccacgggcaggctaagtagctccactcccaacctccagaacatccccgtccgcaccccgcttgggcagaggatccgccgggccttcatcgccgaggaggggtggctattggtggccctggactatagccagatagagctcagggtgctggcccacctctccggcgacgagaacctgatccgggtcttccaggaggggcgggacatccacacggagaccgccagctggatgttcggcgtcccccgggaggccgtggaccccctgatgcgccgggcggccaagaccatcaacttcggggtcctctacggcatgtcggcccaccgcctctcccaggagctagccatcccttacgaggaggcccaggccttcattgagcgctactttcagagcttccccaaggtgcgggcctggattgagaagaccctggaggagggcaggaggcgggggtacgtggagaccctcttcggccgccgccgctacgtgccagacctagaggcccgggtgaagagcgtgcgggaggcggccgagcgcatggccttcaacatgcccgtccagggcaccgccgccgacctcatgaagctggctatggtgaagctcttccccaggctggaggaaatgggggccaggatgctccttcaggtccacgacgagctggtcctcgaggccccaaaagagagggcggaggccgtggcccggctggccaaggaggtcatggagggggtgtatcccctggccgtgcccctggaggtggaggtggggataggggaggactggctctccgccaaggagtgataccaccccatgctggcccaagccagcatgggggccccggcaaaaggtttctggggaagttaccaggcatggtgggccgaaggaaacaggaaacaagggtatgagggttttttgccctaaagaaaggccagggggtcctcccgaaggaaggcttccagggggataccccctgggcccaggagtagcccctttcctccaaaggcctgggtgaaggcttttagccctttggtcctttgggaaggggcgcttttgacctccaaagccagaaggcgccttcccttcttcaagacgaagtcaacctcctggtccctttcccgccagtagtacacctcaaagcccccgtgggggccgtgggccagaaggtgggcgcccacggcggtttccacgagccgccccatgagggcggcgtccgcccacacctcctttggggaaagccccaagaccgccgtgatgagccccgtattaagggccaggagcttggggctcgaggcgcggcgccggaagggctcggcggcgtacttctgcag

SEQ ID NO: 3410 - DNA, 3026 bp, Artificial Sequence
  Description of Artificial Sequence: Synthetic DNA sequence of Thermus aquaticus DNA Polymerase D578N
atgagggggatgctgcccctctttgagcccaagggccgggtcctcctggtggacggccaccacctggcctaccgcaccttccacgccctgaagggcctcaccaccagccggggggagccggtgcaggcggtctacggcttcgccaagagcctcctcaaggccctcaaggaggacggggacgcggtgatcgtggtctttgacgccaaggccccctccttccgccacgaggcctacggggggtacaaggcgggccgggcccccacgccggaggactttccccggcaactcgccctcatcaaggagctggtggacctcctggggctggcgcgcctcgaggtcccgggctacgaggcggacgacgtcctggccagcctggccaagaaggcggaaaaggagggctacgaggtccgcatcctcaccgccgacaaagacctttaccagctcctttccgaccgcatccacgccctccaccccgaggggtacctcatcaccccggcctggctttgggaaaagtacggcctgaggcccgaccagtgggccgactaccgggccctgaccggggacgagtccgacaaccttcccggggtcaagggcatcggggagaagacggcgaggaagcttctggaggagtgggggagcctggaagccctcctcaagaacctggaccggctgaagcccgccatccgggagaagatcctggcccacatggacgatctgaagctctcctgggacctggccaaggtgcgcaccgacctgcccctggaggtggacttcgccaaaaggcgggagcccgaccgggagaggcttagggcctttctggagaggcttgagtttggcagcctcctccacgagttcggccttctggaaagccccaaggccctggaggaggccccctggcccccgccggaaggggccttcgtgggctttgtgctttcccgcaaggagcccatgtgggccgatcttctggccctggccgccgccagggggggccgggtccaccgggcccccgagccttataaagccctcagggacctgaaggaggcgcgggggcttctcgccaaagacctgagcgttctggccctgagggaaggccttggcctcccgcccggcgacgaccccatgctcctcgcctacctcctggacccttccaacaccacccccgagggggtggcccggcgctacggcggggagtggacggaggaggcgggggagcgggccgccctttccgagaggctcttcgccaacctgtgggggaggcttgagggggaggagaggctcctttggctttaccgggaggtggagaggcccctttccgctgtcctggcccacatggaggccacgggggtgcgcctggacgtggcctatctcagggccttgtccctggaggtggccgaggagatcgcccgcctcgaggccgaggtcttccgcctggccggccaccccttcaacctcaactcccgggaccagctggaaagggtcctctttgacgagctagggcttcccgccatcggcaagacggagaagaccggcaagcgctccaccagcgccgccgtcctggaggccctccgcgaggcccaccccatcgtggagaagatcctgcagtaccgggagctcaccaagctgaagagcacctacattgaccccttgccggacctcatccaccccaggacgggccgcctccacacccgcttcaaccagacggccacggccacgggcaggctaagtagctccaatcccaacctccagaacatccccgtccgcaccccgcttgggcagaggatccgccgggccttcatcgccgaggaggggtggctattggtggccctggactatagccagatagagctcagggtgctggcccacctctccggcgacgagaacctgatccgggtcttccaggaggggcgggacatccacacggagaccgccagctggatgttcggcgtcccccgggaggccgtggaccccctgatgcgccgggcggccaagaccatcaacttcggggtcctctacggcatgtcggcccaccgcctctcccaggagctagccatcccttacgaggaggcccaggccttcattgagcgctactttcagagcttccccaaggtgcgggcctggattgagaagaccctggaggagggcaggaggcgggggtacgtggagaccctcttcggccgccgccgctacgtgccagacctagaggcccgggtgaagagcgtgcgggaggcggccgagcgcatggccttcaacatgcccgtccagggcaccgccgccgacctcatgaagctggctatggtgaagctcttccccaggctggaggaaatgggggccaggatgctccttcaggtccacgacgagctggtcctcgaggccccaaaagagagggcggaggccgtggcccggctggccaaggaggtcatggagggggtgtatcccctggccgtgcccctggaggtggaggtggggataggggaggactggctctccgccaaggagtgataccaccccatgctggcccaagccagcatgggggccccggcaaaaggtttctggggaagttaccaggcatggtgggccgaaggaaacaggaaacaagggtatgagggttttttgccctaaagaaaggccagggggtcctcccgaaggaaggcttccagggggataccccctgggcccaggagtagcccctttcctccaaaggcctgggtgaaggcttttagccctttggtcctttgggaaggggcgcttttgacctccaaagccagaaggcgccttcccttcttcaagacgaagtcaacctcctggtccctttcccgccagtagtacacctcaaagcccccgtgggggccgtgggccagaaggtgggcgcccacggcggtttccacgagccgccccatgagggcggcgtccgcccacacctcctttggggaaagccccaagaccgccgtgatgagccccgtattaagggccaggagcttggggctcgaggcgcggcgccggaagggctcggcggcgtacttctgcag

SEQ ID NO: 3411 - DNA, 3026 bp, Artificial Sequence
  Description of Artificial Sequence: Synthetic DNA sequence of Thermus aquaticus DNA Polymerase D578V
atgagggggatgctgcccctctttgagcccaagggccgggtcctcctggtggacggccaccacctggcctaccgcaccttccacgccctgaagggcctcaccaccagccggggggagccggtgcaggcggtctacggcttcgccaagagcctcctcaaggccctcaaggaggacggggacgcggtgatcgtggtctttgacgccaaggccccctccttccgccacgaggcctacggggggtacaaggcgggccgggcccccacgccggaggactttccccggcaactcgccctcatcaaggagctggtggacctcctggggctggcgcgcctcgaggtcccgggctacgaggcggacgacgtcctggccagcctggccaagaaggcggaaaaggagggctacgaggtccgcatcctcaccgccgacaaagacctttaccagctcctttccgaccgcatccacgccctccaccccgaggggtacctcatcaccccggcctggctttgggaaaagtacggcctgaggcccgaccagtgggccgactaccgggccctgaccggggacgagtccgacaaccttcccggggtcaagggcatcggggagaagacggcgaggaagcttctggaggagtgggggagcctggaagccctcctcaagaacctggaccggctgaagcccgccatccgggagaagatcctggcccacatggacgatctgaagctctcctgggacctggccaaggtgcgcaccgacctgcccctggaggtggacttcgccaaaaggcgggagcccgaccgggagaggcttagggcctttctggagaggcttgagtttggcagcctcctccacgagttcggccttctggaaagccccaaggccctggaggaggccccctggcccccgccggaaggggccttcgtgggctttgtgctttcccgcaaggagcccatgtgggccgatcttctggccctggccgccgccagggggggccgggtccaccgggcccccgagccttataaagccctcagggacctgaaggaggcgcgggggcttctcgccaaagacctgagcgttctggccctgagggaaggccttggcctcccgcccggcgacgaccccatgctcctcgcctacctcctggacccttccaacaccacccccgagggggtggcccggcgctacggcggggagtggacggaggaggcgggggagcgggccgccctttccgagaggctcttcgccaacctgtgggggaggcttgagggggaggagaggctcctttggctttaccgggaggtggagaggcccctttccgctgtcctggcccacatggaggccacgggggtgcgcctggacgtggcctatctcagggccttgtccctggaggtggccgaggagatcgcccgcctcgaggccgaggtcttccgcctggccggccaccccttcaacctcaactcccgggaccagctggaaagggtcctctttgacgagctagggcttcccgccatcggcaagacggagaagaccggcaagcgctccaccagcgccgccgtcctggaggccctccgcgaggcccaccccatcgtggagaagatcctgcagtaccgggagctcaccaagctgaagagcacctacattgaccccttgccggacctcatccaccccaggacgggccgcctccacacccgcttcaaccagacggccacggccacgggcaggctaagtagctccgtccccaacctccagaacatccccgtccgcaccccgcttgggcagaggatccgccgggccttcatcgccgaggaggggtggctattggtggccctggactatagccagatagagctcagggtgctggcccacctctccggcgacgagaacctgatccgggtcttccaggaggggcgggacatccacacggagaccgccagctggatgttcggcgtcccccgggaggccgtggaccccctgatgcgccgggcggccaagaccatcaacttcggggtcctctacggcatgtcggcccaccgcctctcccaggagctagccatcccttacgaggaggcccaggccttcattgagcgctactttcagagcttccccaaggtgcgggcctggattgagaagaccctggaggagggcaggaggcgggggtacgtggagaccctcttcggccgccgccgctacgtgccagacctagaggcccgggtgaagagcgtgcgggaggcggccgagcgcatggccttcaacatgcccgtccagggcaccgccgccgacctcatgaagctggctatggtgaagctcttccccaggctggaggaaatgggggccaggatgctccttcaggtccacgacgagctggtcctcgaggccccaaaagagagggcggaggccgtggcccggctggccaaggaggtcatggagggggtgtatcccctggccgtgcccctggaggtggaggtggggataggggaggactggctctccgccaaggagtgataccaccccatgctggcccaagccagcatgggggccccggcaaaaggtttctggggaagttaccaggcatggtgggccgaaggaaacaggaaacaagggtatgagggttttttgccctaaagaaaggccagggggtcctcccgaaggaaggcttccagggggataccccctgggcccaggagtagcccctttcctccaaaggcctgggtgaaggcttttagccctttggtcctttgggaaggggcgcttttgacctccaaagccagaaggcgccttcccttcttcaagacgaagtcaacctcctggtccctttcccgccagtagtacacctcaaagcccccgtgggggccgtgggccagaaggtgggcgcccacggcggtttccacgagccgccccatgagggcggcgtccgcccacacctcctttggggaaagccccaagaccgccgtgatgagccccgtattaagggccaggagcttggggctcgaggcgcggcgccggaagggctcggcggcgtacttctgcag

SEQ ID NO: 3412 - DNA, 3026 bp, Artificial Sequence
  Description of Artificial Sequence: Synthetic DNA sequence of Thermus aquaticus DNA Polymerase A661R
atgagggggatgctgcccctctttgagcccaagggccgggtcctcctggtggacggccaccacctggcctaccgcaccttccacgccctgaagggcctcaccaccagccggggggagccggtgcaggcggtctacggcttcgccaagagcctcctcaaggccctcaaggaggacggggacgcggtgatcgtggtctttgacgccaaggccccctccttccgccacgaggcctacggggggtacaaggcgggccgggcccccacgccggaggactttccccggcaactcgccctcatcaaggagctggtggacctcctggggctggcgcgcctcgaggtcccgggctacgaggcggacgacgtcctggccagcctggccaagaaggcggaaaaggagggctacgaggtccgcatcctcaccgccgacaaagacctttaccagctcctttccgaccgcatccacgccctccaccccgaggggtacctcatcaccccggcctggctttgggaaaagtacggcctgaggcccgaccagtgggccgactaccgggccctgaccggggacgagtccgacaaccttcccggggtcaagggcatcggggagaagacggcgaggaagcttctggaggagtgggggagcctggaagccctcctcaagaacctggaccggctgaagcccgccatccgggagaagatcctggcccacatggacgatctgaagctctcctgggacctggccaaggtgcgcaccgacctgcccctggaggtggacttcgccaaaaggcgggagcccgaccgggagaggcttagggcctttctggagaggcttgagtttggcagcctcctccacgagttcggccttctggaaagccccaaggccctggaggaggccccctggcccccgccggaaggggccttcgtgggctttgtgctttcccgcaaggagcccatgtgggccgatcttctggccctggccgccgccagggggggccgggtccaccgggcccccgagccttataaagccctcagggacctgaaggaggcgcgggggcttctcgccaaagacctgagcgttctggccctgagggaaggccttggcctcccgcccggcgacgaccccatgctcctcgcctacctcctggacccttccaacaccacccccgagggggtggcccggcgctacggcggggagtggacggaggaggcgggggagcgggccgccctttccgagaggctcttcgccaacctgtgggggaggcttgagggggaggagaggctcctttggctttaccgggaggtggagaggcccctttccgctgtcctggcccacatggaggccacgggggtgcgcctggacgtggcctatctcagggccttgtccctggaggtggccgaggagatcgcccgcctcgaggccgaggtcttccgcctggccggccaccccttcaacctcaactcccgggaccagctggaaagggtcctctttgacgagctagggcttcccgccatcggcaagacggagaagaccggcaagcgctccaccagcgccgccgtcctggaggccctccgcgaggcccaccccatcgtggagaagatcctgcagtaccgggagctcaccaagctgaagagcacctacattgaccccttgccggacctcatccaccccaggacgggccgcctccacacccgcttcaaccagacggccacggccacgggcaggctaagtagctccgatcccaacctccagaacatccccgtccgcaccccgcttgggcagaggatccgccgggccttcatcgccgaggaggggtggctattggtggccctggactatagccagatagagctcagggtgctggcccacctctccggcgacgagaacctgatccgggtcttccaggaggggcgggacatccacacggagaccgccagctggatgttcggcgtcccccgggaggccgtggaccccctgatgcgccggcgagccaagaccatcaacttcggggtcctctacggcatgtcggcccaccgcctctcccaggagctagccatcccttacgaggaggcccaggccttcattgagcgctactttcagagcttccccaaggtgcgggcctggattgagaagaccctggaggagggcaggaggcgggggtacgtggagaccctcttcggccgccgccgctacgtgccagacctagaggcccgggtgaagagcgtgcgggaggcggccgagcgcatggccttcaacatgcccgtccagggcaccgccgccgacctcatgaagctggctatggtgaagctcttccccaggctggaggaaatgggggccaggatgctccttcaggtccacgacgagctggtcctcgaggccccaaaagagagggcggaggccgtggcccggctggccaaggaggtcatggagggggtgtatcccctggccgtgcccctggaggtggaggtggggataggggaggactggctctccgccaaggagtgataccaccccatgctggcccaagccagcatgggggccccggcaaaaggtttctggggaagttaccaggcatggtgggccgaaggaaacaggaaacaagggtatgagggttttttgccctaaagaaaggccagggggtcctcccgaaggaaggcttccagggggataccccctgggcccaggagtagcccctttcctccaaaggcctgggtgaaggcttttagccctttggtcctttgggaaggggcgcttttgacctccaaagccagaaggcgccttcccttcttcaagacgaagtcaacctcctggtccctttcccgccagtagtacacctcaaagcccccgtgggggccgtgggccagaaggtgggcgcccacggcggtttccacgagccgccccatgagggcggcgtccgcccacacctcctttggggaaagccccaagaccgccgtgatgagccccgtattaagggccaggagcttggggctcgaggcgcggcgccggaagggctcggcggcgtacttctgcag

SEQ ID NO: 3413 - DNA, 3026 bp, Artificial Sequence
  Description of Artificial Sequence: Synthetic DNA sequence of Thermus aquaticus DNA Polymerase A661C
atgagggggatgctgcccctctttgagcccaagggccgggtcctcctggtggacggccaccacctggcctaccgcaccttccacgccctgaagggcctcaccaccagccggggggagccggtgcaggcggtctacggcttcgccaagagcctcctcaaggccctcaaggaggacggggacgcggtgatcgtggtctttgacgccaaggccccctccttccgccacgaggcctacggggggtacaaggcgggccgggcccccacgccggaggactttccccggcaactcgccctcatcaaggagctggtggacctcctggggctggcgcgcctcgaggtcccgggctacgaggcggacgacgtcctggccagcctggccaagaaggcggaaaaggagggctacgaggtccgcatcctcaccgccgacaaagacctttaccagctcctttccgaccgcatccacgccctccaccccgaggggtacctcatcaccccggcctggctttgggaaaagtacggcctgaggcccgaccagtgggccgactaccgggccctgaccggggacgagtccgacaaccttcccggggtcaagggcatcggggagaagacggcgaggaagcttctggaggagtgggggagcctggaagccctcctcaagaacctggaccggctgaagcccgccatccgggagaagatcctggcccacatggacgatctgaagctctcctgggacctggccaaggtgcgcaccgacctgcccctggaggtggacttcgccaaaaggcgggagcccgaccgggagaggcttagggcctttctggagaggcttgagtttggcagcctcctccacgagttcggccttctggaaagccccaaggccctggaggaggccccctggcccccgccggaaggggccttcgtgggctttgtgctttcccgcaaggagcccatgtgggccgatcttctggccctggccgccgccagggggggccgggtccaccgggcccccgagccttataaagccctcagggacctgaaggaggcgcgggggcttctcgccaaagacctgagcgttctggccctgagggaaggccttggcctcccgcccggcgacgaccccatgctcctcgcctacctcctggacccttccaacaccacccccgagggggtggcccggcgctacggcggggagtggacggaggaggcgggggagcgggccgccctttccgagaggctcttcgccaacctgtgggggaggcttgagggggaggagaggctcctttggctttaccgggaggtggagaggcccctttccgctgtcctggcccacatggaggccacgggggtgcgcctggacgtggcctatctcagggccttgtccctggaggtggccgaggagatcgcccgcctcgaggccgaggtcttccgcctggccggccaccccttcaacctcaactcccgggaccagctggaaagggtcctctttgacgagctagggcttcccgccatcggcaagacggagaagaccggcaagcgctccaccagcgccgccgtcctggaggccctccgcgaggcccaccccatcgtggagaagatcctgcagtaccgggagctcaccaagctgaagagcacctacattgaccccttgccggacctcatccaccccaggacgggccgcctccacacccgcttcaaccagacggccacggccacgggcaggctaagtagctccgatcccaacctccagaacatccccgtccgcaccccgcttgggcagaggatccgccgggccttcatcgccgaggaggggtggctattggtggccctggactatagccagatagagctcagggtgctggcccacctctccggcgacgagaacctgatccgggtcttccaggaggggcgggacatccacacggagaccgccagctggatgttcggcgtcccccgggaggccgtggaccccctgatgcgccggtgtgccaagaccatcaacttcggggtcctctacggcatgtcggcccaccgcctctcccaggagctagccatcccttacgaggaggcccaggccttcattgagcgctactttcagagcttccccaaggtgcgggcctggattgagaagaccctggaggagggcaggaggcgggggtacgtggagaccctcttcggccgccgccgctacgtgccagacctagaggcccgggtgaagagcgtgcgggaggcggccgagcgcatggccttcaacatgcccgtccagggcaccgccgccgacctcatgaagctggctatggtgaagctcttccccaggctggaggaaatgggggccaggatgctccttcaggtccacgacgagctggtcctcgaggccccaaaagagagggcggaggccgtggcccggctggccaaggaggtcatggagggggtgtatcccctggccgtgcccctggaggtggaggtggggataggggaggactggctctccgccaaggagtgataccaccccatgctggcccaagccagcatgggggccccggcaaaaggtttctggggaagttaccaggcatggtgggccgaaggaaacaggaaacaagggtatgagggttttttgccctaaagaaaggccagggggtcctcccgaaggaaggcttccagggggataccccctgggcccaggagtagcccctttcctccaaaggcctgggtgaaggcttttagccctttggtcctttgggaaggggcgcttttgacctccaaagccagaaggcgccttcccttcttcaagacgaagtcaacctcctggtccctttcccgccagtagtacacctcaaagcccccgtgggggccgtgggccagaaggtgggcgcccacggcggtttccacgagccgccccatgagggcggcgtccgcccacacctcctttggggaaagccccaagaccgccgtgatgagccccgtattaagggccaggagcttggggctcgaggcgcggcgccggaagggctcggcggcgtacttctgcag

SEQ ID NO: 3414 - DNA, 3026 bp, Artificial Sequence
  Description of Artificial Sequence: Synthetic DNA sequence of Thermus aquaticus DNA Polymerase A661G
atgagggggatgctgcccctctttgagcccaagggccgggtcctcctggtggacggccaccacctggcctaccgcaccttccacgccctgaagggcctcaccaccagccggggggagccggtgcaggcggtctacggcttcgccaagagcctcctcaaggccctcaaggaggacggggacgcggtgatcgtggtctttgacgccaaggccccctccttccgccacgaggcctacggggggtacaaggcgggccgggcccccacgccggaggactttccccggcaactcgccctcatcaaggagctggtggacctcctggggctggcgcgcctcgaggtcccgggctacgaggcggacgacgtcctggccagcctggccaagaaggcggaaaaggagggctacgaggtccgcatcctcaccgccgacaaagacctttaccagctcctttccgaccgcatccacgccctccaccccgaggggtacctcatcaccccggcctggctttgggaaaagtacggcctgaggcccgaccagtgggccgactaccgggccctgaccggggacgagtccgacaaccttcccggggtcaagggcatcggggagaagacggcgaggaagcttctggaggagtgggggagcctggaagccctcctcaagaacctggaccggctgaagcccgccatccgggagaagatcctggcccacatggacgatctgaagctctcctgggacctggccaaggtgcgcaccgacctgcccctggaggtggacttcgccaaaaggcgggagcccgaccgggagaggcttagggcctttctggagaggcttgagtttggcagcctcctccacgagttcggccttctggaaagccccaaggccctggaggaggccccctggcccccgccggaaggggccttcgtgggctttgtgctttcccgcaaggagcccatgtgggccgatcttctggccctggccgccgccagggggggccgggtccaccgggcccccgagccttataaagccctcagggacctgaaggaggcgcgggggcttctcgccaaagacctgagcgttctggccctgagggaaggccttggcctcccgcccggcgacgaccccatgctcctcgcctacctcctggacccttccaacaccacccccgagggggtggcccggcgctacggcggggagtggacggaggaggcgggggagcgggccgccctttccgagaggctcttcgccaacctgtgggggaggcttgagggggaggagaggctcctttggctttaccgggaggtggagaggcccctttccgctgtcctggcccacatggaggccacgggggtgcgcctggacgtggcctatctcagggccttgtccctggaggtggccgaggagatcgcccgcctcgaggccgaggtcttccgcctggccggccaccccttcaacctcaactcccgggaccagctggaaagggtcctctttgacgagctagggcttcccgccatcggcaagacggagaagaccggcaagcgctccaccagcgccgccgtcctggaggccctccgcgaggcccaccccatcgtggagaagatcctgcagtaccgggagctcaccaagctgaagagcacctacattgaccccttgccggacctcatccaccccaggacgggccgcctccacacccgcttcaaccagacggccacggccacgggcaggctaagtagctccgatcccaacctccagaacatccccgtccgcaccccgcttgggcagaggatccgccgggccttcatcgccgaggaggggtggctattggtggccctggactatagccagatagagctcagggtgctggcccacctctccggcgacgagaacctgatccgggtcttccaggaggggcgggacatccacacggagaccgccagctggatgttcggcgtcccccgggaggccgtggaccccctgatgcgccggggtgccaagaccatcaacttcggggtcctctacggcatgtcggcccaccgcctctcccaggagctagccatcccttacgaggaggcccaggccttcattgagcgctactttcagagcttccccaaggtgcgggcctggattgagaagaccctggaggagggcaggaggcgggggtacgtggagaccctcttcggccgccgccgctacgtgccagacctagaggcccgggtgaagagcgtgcgggaggcggccgagcgcatggccttcaacatgcccgtccagggcaccgccgccgacctcatgaagctggctatggtgaagctcttccccaggctggaggaaatgggggccaggatgctccttcaggtccacgacgagctggtcctcgaggccccaaaagagagggcggaggccgtggcccggctggccaaggaggtcatggagggggtgtatcccctggccgtgcccctggaggtggaggtggggataggggaggactggctctccgccaaggagtgataccaccccatgctggcccaagccagcatgggggccccggcaaaaggtttctggggaagttaccaggcatggtgggccgaaggaaacaggaaacaagggtatgagggttttttgccctaaagaaaggccagggggtcctcccgaaggaaggcttccagggggataccccctgggcccaggagtagcccctttcctccaaaggcctgggtgaaggcttttagccctttggtcctttgggaaggggcgcttttgacctccaaagccagaaggcgccttcccttcttcaagacgaagtcaacctcctggtccctttcccgccagtagtacacctcaaagcccccgtgggggccgtgggccagaaggtgggcgcccacggcggtttccacgagccgccccatgagggcggcgtccgcccacacctcctttggggaaagccccaagaccgccgtgatgagccccgtattaagggccaggagcttggggctcgaggcgcggcgccggaagggctcggcggcgtacttctgcag

SEQ ID NO: 3415 - DNA, 3026 bp, Artificial Sequence
  Description of Artificial Sequence: Synthetic DNA sequence of Thermus aquaticus DNA Polymerase A661Q
atgagggggatgctgcccctctttgagcccaagggccgggtcctcctggtggacggccaccacctggcctaccgcaccttccacgccctgaagggcctcaccaccagccggggggagccggtgcaggcggtctacggcttcgccaagagcctcctcaaggccctcaaggaggacggggacgcggtgatcgtggtctttgacgccaaggccccctccttccgccacgaggcctacggggggtacaaggcgggccgggcccccacgccggaggactttccccggcaactcgccctcatcaaggagctggtggacctcctggggctggcgcgcctcgaggtcccgggctacgaggcggacgacgtcctggccagcctggccaagaaggcggaaaaggagggctacgaggtccgcatcctcaccgccgacaaagacctttaccagctcctttccgaccgcatccacgccctccaccccgaggggtacctcatcaccccggcctggctttgggaaaagtacggcctgaggcccgaccagtgggccgactaccgggccctgaccggggacgagtccgacaaccttcccggggtcaagggcatcggggagaagacggcgaggaagcttctggaggagtgggggagcctggaagccctcctcaagaacctggaccggctgaagcccgccatccgggagaagatcctggcccacatggacgatctgaagctctcctgggacctggccaaggtgcgcaccgacctgcccctggaggtggacttcgccaaaaggcgggagcccgaccgggagaggcttagggcctttctggagaggcttgagtttggcagcctcctccacgagttcggccttctggaaagccccaaggccctggaggaggccccctggcccccgccggaaggggccttcgtgggctttgtgctttcccgcaaggagcccatgtgggccgatcttctggccctggccgccgccagggggggccgggtccaccgggcccccgagccttataaagccctcagggacctgaaggaggcgcgggggcttctcgccaaagacctgagcgttctggccctgagggaaggccttggcctcccgcccggcgacgaccccatgctcctcgcctacctcctggacccttccaacaccacccccgagggggtggcccggcgctacggcggggagtggacggaggaggcgggggagcgggccgccctttccgagaggctcttcgccaacctgtgggggaggcttgagggggaggagaggctcctttggctttaccgggaggtggagaggcccctttccgctgtcctggcccacatggaggccacgggggtgcgcctggacgtggcctatctcagggccttgtccctggaggtggccgaggagatcgcccgcctcgaggccgaggtcttccgcctggccggccaccccttcaacctcaactcccgggaccagctggaaagggtcctctttgacgagctagggcttcccgccatcggcaagacggagaagaccggcaagcgctccaccagcgccgccgtcctggaggccctccgcgaggcccaccccatcgtggagaagatcctgcagtaccgggagctcaccaagctgaagagcacctacattgaccccttgccggacctcatccaccccaggacgggccgcctccacacccgcttcaaccagacggccacggccacgggcaggctaagtagctccgatcccaacctccagaacatccccgtccgcaccccgcttgggcagaggatccgccgggccttcatcgccgaggaggggtggctattggtggccctggactatagccagatagagctcagggtgctggcccacctctccggcgacgagaacctgatccgggtcttccaggaggggcgggacatccacacggagaccgccagctggatgttcggcgtcccccgggaggccgtggaccccctgatgcgccggcaagccaagaccatcaacttcggggtcctctacggcatgtcggcccaccgcctctcccaggagctagccatcccttacgaggaggcccaggccttcattgagcgctactttcagagcttccccaaggtgcgggcctggattgagaagaccctggaggagggcaggaggcgggggtacgtggagaccctcttcggccgccgccgctacgtgccagacctagaggcccgggtgaagagcgtgcgggaggcggccgagcgcatggccttcaacatgcccgtccagggcaccgccgccgacctcatgaagctggctatggtgaagctcttccccaggctggaggaaatgggggccaggatgctccttcaggtccacgacgagctggtcctcgaggccccaaaagagagggcggaggccgtggcccggctggccaaggaggtcatggagggggtgtatcccctggccgtgcccctggaggtggaggtggggataggggaggactggctctccgccaaggagtgataccaccccatgctggcccaagccagcatgggggccccggcaaaaggtttctggggaagttaccaggcatggtgggccgaaggaaacaggaaacaagggtatgagggttttttgccctaaagaaaggccagggggtcctcccgaaggaaggcttccagggggataccccctgggcccaggagtagcccctttcctccaaaggcctgggtgaaggcttttagccctttggtcctttgggaaggggcgcttttgacctccaaagccagaaggcgccttcccttcttcaagacgaagtcaacctcctggtccctttcccgccagtagtacacctcaaagcccccgtgggggccgtgggccagaaggtgggcgcccacggcggtttccacgagccgccccatgagggcggcgtccgcccacacctcctttggggaaagccccaagaccgccgtgatgagccccgtattaagggccaggagcttggggctcgaggcgcggcgccggaagggctcggcggcgtacttctgcag

SEQ ID NO: 3416 - DNA, 3026 bp, Artificial Sequence
  Description of Artificial Sequence: Synthetic DNA sequence of Thermus aquaticus DNA Polymerase A661H
atgagggggatgctgcccctctttgagcccaagggccgggtcctcctggtggacggccaccacctggcctaccgcaccttccacgccctgaagggcctcaccaccagccggggggagccggtgcaggcggtctacggcttcgccaagagcctcctcaaggccctcaaggaggacggggacgcggtgatcgtggtctttgacgccaaggccccctccttccgccacgaggcctacggggggtacaaggcgggccgggcccccacgccggaggactttccccggcaactcgccctcatcaaggagctggtggacctcctggggctggcgcgcctcgaggtcccgggctacgaggcggacgacgtcctggccagcctggccaagaaggcggaaaaggagggctacgaggtccgcatcctcaccgccgacaaagacctttaccagctcctttccgaccgcatccacgccctccaccccgaggggtacctcatcaccccggcctggctttgggaaaagtacggcctgaggcccgaccagtgggccgactaccgggccctgaccggggacgagtccgacaaccttcccggggtcaagggcatcggggagaagacggcgaggaagcttctggaggagtgggggagcctggaagccctcctcaagaacctggaccggctgaagcccgccatccgggagaagatcctggcccacatggacgatctgaagctctcctgggacctggccaaggtgcgcaccgacctgcccctggaggtggacttcgccaaaaggcgggagcccgaccgggagaggcttagggcctttctggagaggcttgagtttggcagcctcctccacgagttcggccttctggaaagccccaaggccctggaggaggccccctggcccccgccggaaggggccttcgtgggctttgtgctttcccgcaaggagcccatgtgggccgatcttctggccctggccgccgccagggggggccgggtccaccgggcccccgagccttataaagccctcagggacctgaaggaggcgcgggggcttctcgccaaagacctgagcgttctggccctgagggaaggccttggcctcccgcccggcgacgaccccatgctcctcgcctacctcctggacccttccaacaccacccccgagggggtggcccggcgctacggcggggagtggacggaggaggcgggggagcgggccgccctttccgagaggctcttcgccaacctgtgggggaggcttgagggggaggagaggctcctttggctttaccgggaggtggagaggcccctttccgctgtcctggcccacatggaggccacgggggtgcgcctggacgtggcctatctcagggccttgtccctggaggtggccgaggagatcgcccgcctcgaggccgaggtcttccgcctggccggccaccccttcaacctcaactcccgggaccagctggaaagggtcctctttgacgagctagggcttcccgccatcggcaagacggagaagaccggcaagcgctccaccagcgccgccgtcctggaggccctccgcgaggcccaccccatcgtggagaagatcctgcagtaccgggagctcaccaagctgaagagcacctacattgaccccttgccggacctcatccaccccaggacgggccgcctccacacccgcttcaaccagacggccacggccacgggcaggctaagtagctccgatcccaacctccagaacatccccgtccgcaccccgcttgggcagaggatccgccgggccttcatcgccgaggaggggtggctattggtggccctggactatagccagatagagctcagggtgctggcccacctctccggcgacgagaacctgatccgggtcttccaggaggggcgggacatccacacggagaccgccagctggatgttcggcgtcccccgggaggccgtggaccccctgatgcgccggcatgccaagaccatcaacttcggggtcctctacggcatgtcggcccaccgcctctcccaggagctagccatcccttacgaggaggcccaggccttcattgagcgctactttcagagcttccccaaggtgcgggcctggattgagaagaccctggaggagggcaggaggcgggggtacgtggagaccctcttcggccgccgccgctacgtgccagacctagaggcccgggtgaagagcgtgcgggaggcggccgagcgcatggccttcaacatgcccgtccagggcaccgccgccgacctcatgaagctggctatggtgaagctcttccccaggctggaggaaatgggggccaggatgctccttcaggtccacgacgagctggtcctcgaggccccaaaagagagggcggaggccgtggcccggctggccaaggaggtcatggagggggtgtatcccctggccgtgcccctggaggtggaggtggggataggggaggactggctctccgccaaggagtgataccaccccatgctggcccaagccagcatgggggccccggcaaaaggtttctggggaagttaccaggcatggtgggccgaaggaaacaggaaacaagggtatgagggttttttgccctaaagaaaggccagggggtcctcccgaaggaaggcttccagggggataccccctgggcccaggagtagcccctttcctccaaaggcctgggtgaaggcttttagccctttggtcctttgggaaggggcgcttttgacctccaaagccagaaggcgccttcccttcttcaagacgaagtcaacctcctggtccctttcccgccagtagtacacctcaaagcccccgtgggggccgtgggccagaaggtgggcgcccacggcggtttccacgagccgccccatgagggcggcgtccgcccacacctcctttggggaaagccccaagaccgccgtgatgagccccgtattaagggccaggagcttggggctcgaggcgcggcgccggaagggctcggcggcgtacttctgcag

SEQ ID NO: 3417 - DNA, 3026 bp, Artificial Sequence
  Description of Artificial Sequence: Synthetic DNA sequence of Thermus aquaticus DNA Polymerase A661I
atgagggggatgctgcccctctttgagcccaagggccgggtcctcctggtggacggccaccacctggcctaccgcaccttccacgccctgaagggcctcaccaccagccggggggagccggtgcaggcggtctacggcttcgccaagagcctcctcaaggccctcaaggaggacggggacgcggtgatcgtggtctttgacgccaaggccccctccttccgccacgaggcctacggggggtacaaggcgggccgggcccccacgccggaggactttccccggcaactcgccctcatcaaggagctggtggacctcctggggctggcgcgcctcgaggtcccgggctacgaggcggacgacgtcctggccagcctggccaagaaggcggaaaaggagggctacgaggtccgcatcctcaccgccgacaaagacctttaccagctcctttccgaccgcatccacgccctccaccccgaggggtacctcatcaccccggcctggctttgggaaaagtacggcctgaggcccgaccagtgggccgactaccgggccctgaccggggacgagtccgacaaccttcccggggtcaagggcatcggggagaagacggcgaggaagcttctggaggagtgggggagcctggaagccctcctcaagaacctggaccggctgaagcccgccatccgggagaagatcctggcccacatggacgatctgaagctctcctgggacctggccaaggtgcgcaccgacctgcccctggaggtggacttcgccaaaaggcgggagcccgaccgggagaggcttagggcctttctggagaggcttgagtttggcagcctcctccacgagttcggccttctggaaagccccaaggccctggaggaggccccctggcccccgccggaaggggccttcgtgggctttgtgctttcccgcaaggagcccatgtgggccgatcttctggccctggccgccgccagggggggccgggtccaccgggcccccgagccttataaagccctcagggacctgaaggaggcgcgggggcttctcgccaaagacctgagcgttctggccctgagggaaggccttggcctcccgcccggcgacgaccccatgctcctcgcctacctcctggacccttccaacaccacccccgagggggtggcccggcgctacggcggggagtggacggaggaggcgggggagcgggccgccctttccgagaggctcttcgccaacctgtgggggaggcttgagggggaggagaggctcctttggctttaccgggaggtggagaggcccctttccgctgtcctggcccacatggaggccacgggggtgcgcctggacgtggcctatctcagggccttgtccctggaggtggccgaggagatcgcccgcctcgaggccgaggtcttccgcctggccggccaccccttcaacctcaactcccgggaccagctggaaagggtcctctttgacgagctagggcttcccgccatcggcaagacggagaagaccggcaagcgctccaccagcgccgccgtcctggaggccctccgcgaggcccaccccatcgtggagaagatcctgcagtaccgggagctcaccaagctgaagagcacctacattgaccccttgccggacctcatccaccccaggacgggccgcctccacacccgcttcaaccagacggccacggccacgggcaggctaagtagctccgatcccaacctccagaacatccccgtccgcaccccgcttgggcagaggatccgccgggccttcatcgccgaggaggggtggctattggtggccctggactatagccagatagagctcagggtgctggcccacctctccggcgacgagaacctgatccgggtcttccaggaggggcgggacatccacacggagaccgccagctggatgttcggcgtcccccgggaggccgtggaccccctgatgcgccggattgccaagaccatcaacttcggggtcctctacggcatgtcggcccaccgcctctcccaggagctagccatcccttacgaggaggcccaggccttcattgagcgctactttcagagcttccccaaggtgcgggcctggattgagaagaccctggaggagggcaggaggcgggggtacgtggagaccctcttcggccgccgccgctacgtgccagacctagaggcccgggtgaagagcgtgcgggaggcggccgagcgcatggccttcaacatgcccgtccagggcaccgccgccgacctcatgaagctggctatggtgaagctcttccccaggctggaggaaatgggggccaggatgctccttcaggtccacgacgagctggtcctcgaggccccaaaagagagggcggaggccgtggcccggctggccaaggaggtcatggagggggtgtatcccctggccgtgcccctggaggtggaggtggggataggggaggactggctctccgccaaggagtgataccaccccatgctggcccaagccagcatgggggccccggcaaaaggtttctggggaagttaccaggcatggtgggccgaaggaaacaggaaacaagggtatgagggttttttgccctaaagaaaggccagggggtcctcccgaaggaaggcttccagggggataccccctgggcccaggagtagcccctttcctccaaaggcctgggtgaaggcttttagccctttggtcctttgggaaggggcgcttttgacctccaaagccagaaggcgccttcccttcttcaagacgaagtcaacctcctggtccctttcccgccagtagtacacctcaaagcccccgtgggggccgtgggccagaaggtgggcgcccacggcggtttccacgagccgccccatgagggcggcgtccgcccacacctcctttggggaaagccccaagaccgccgtgatgagccccgtattaagggccaggagcttggggctcgaggcgcggcgccggaagggctcggcggcgtacttctgcag

SEQ ID NO: 3418 - DNA, 3026 bp, Artificial Sequence
  Description of Artificial Sequence: Synthetic DNA sequence of Thermus aquaticus DNA Polymerase A661L
atgagggggatgctgcccctctttgagcccaagggccgggtcctcctggtggacggccaccacctggcctaccgcaccttccacgccctgaagggcctcaccaccagccggggggagccggtgcaggcggtctacggcttcgccaagagcctcctcaaggccctcaaggaggacggggacgcggtgatcgtggtctttgacgccaaggccccctccttccgccacgaggcctacggggggtacaaggcgggccgggcccccacgccggaggactttccccggcaactcgccctcatcaaggagctggtggacctcctggggctggcgcgcctcgaggtcccgggctacgaggcggacgacgtcctggccagcctggccaagaaggcggaaaaggagggctacgaggtccgcatcctcaccgccgacaaagacctttaccagctcctttccgaccgcatccacgccctccaccccgaggggtacctcatcaccccggcctggctttgggaaaagtacggcctgaggcccgaccagtgggccgactaccgggccctgaccggggacgagtccgacaaccttcccggggtcaagggcatcggggagaagacggcgaggaagcttctggaggagtgggggagcctggaagccctcctcaagaacctggaccggctgaagcccgccatccgggagaagatcctggcccacatggacgatctgaagctctcctgggacctggccaaggtgcgcaccgacctgcccctggaggtggacttcgccaaaaggcgggagcccgaccgggagaggcttagggcctttctggagaggcttgagtttggcagcctcctccacgagttcggccttctggaaagccccaaggccctggaggaggccccctggcccccgccggaaggggccttcgtgggctttgtgctttcccgcaaggagcccatgtgggccgatcttctggccctggccgccgccagggggggccgggtccaccgggcccccgagccttataaagccctcagggacctgaaggaggcgcgggggcttctcgccaaagacctgagcgttctggccctgagggaaggccttggcctcccgcccggcgacgaccccatgctcctcgcctacctcctggacccttccaacaccacccccgagggggtggcccggcgctacggcggggagtggacggaggaggcgggggagcgggccgccctttccgagaggctcttcgccaacctgtgggggaggcttgagggggaggagaggctcctttggctttaccgggaggtggagaggcccctttccgctgtcctggcccacatggaggccacgggggtgcgcctggacgtggcctatctcagggccttgtccctggaggtggccgaggagatcgcccgcctcgaggccgaggtcttccgcctggccggccaccccttcaacctcaactcccgggaccagctggaaagggtcctctttgacgagctagggcttcccgccatcggcaagacggagaagaccggcaagcgctccaccagcgccgccgtcctggaggccctccgcgaggcccaccccatcgtggagaagatcctgcagtaccgggagctcaccaagctgaagagcacctacattgaccccttgccggacctcatccaccccaggacgggccgcctccacacccgcttcaaccagacggccacggccacgggcaggctaagtagctccgatcccaacctccagaacatccccgtccgcaccccgcttgggcagaggatccgccgggccttcatcgccgaggaggggtggctattggtggccctggactatagccagatagagctcagggtgctggcccacctctccggcgacgagaacctgatccgggtcttccaggaggggcgggacatccacacggagaccgccagctggatgttcggcgtcccccgggaggccgtggaccccctgatgcgccggttagccaagaccatcaacttcggggtcctctacggcatgtcggcccaccgcctctcccaggagctagccatcccttacgaggaggcccaggccttcattgagcgctactttcagagcttccccaaggtgcgggcctggattgagaagaccctggaggagggcaggaggcgggggtacgtggagaccctcttcggccgccgccgctacgtgccagacctagaggcccgggtgaagagcgtgcgggaggcggccgagcgcatggccttcaacatgcccgtccagggcaccgccgccgacctcatgaagctggctatggtgaagctcttccccaggctggaggaaatgggggccaggatgctccttcaggtccacgacgagctggtcctcgaggccccaaaagagagggcggaggccgtggcccggctggccaaggaggtcatggagggggtgtatcccctggccgtgcccctggaggtggaggtggggataggggaggactggctctccgccaaggagtgataccaccccatgctggcccaagccagcatgggggccccggcaaaaggtttctggggaagttaccaggcatggtgggccgaaggaaacaggaaacaagggtatgagggttttttgccctaaagaaaggccagggggtcctcccgaaggaaggcttccagggggataccccctgggcccaggagtagcccctttcctccaaaggcctgggtgaaggcttttagccctttggtcctttgggaaggggcgcttttgacctccaaagccagaaggcgccttcccttcttcaagacgaagtcaacctcctggtccctttcccgccagtagtacacctcaaagcccccgtgggggccgtgggccagaaggtgggcgcccacggcggtttccacgagccgccccatgagggcggcgtccgcccacacctcctttggggaaagccccaagaccgccgtgatgagccccgtattaagggccaggagcttggggctcgaggcgcggcgccggaagggctcggcggcgtacttctgcag

SEQ ID NO: 3419 - DNA, 3026 bp, Artificial Sequence
  Description of Artificial Sequence: Synthetic DNA sequence of Thermus aquaticus DNA Polymerase A661K
atgagggggatgctgcccctctttgagcccaagggccgggtcctcctggtggacggccaccacctggcctaccgcaccttccacgccctgaagggcctcaccaccagccggggggagccggtgcaggcggtctacggcttcgccaagagcctcctcaaggccctcaaggaggacggggacgcggtgatcgtggtctttgacgccaaggccccctccttccgccacgaggcctacggggggtacaaggcgggccgggcccccacgccggaggactttccccggcaactcgccctcatcaaggagctggtggacctcctggggctggcgcgcctcgaggtcccgggctacgaggcggacgacgtcctggccagcctggccaagaaggcggaaaaggagggctacgaggtccgcatcctcaccgccgacaaagacctttaccagctcctttccgaccgcatccacgccctccaccccgaggggtacctcatcaccccggcctggctttgggaaaagtacggcctgaggcccgaccagtgggccgactaccgggccctgaccggggacgagtccgacaaccttcccggggtcaagggcatcggggagaagacggcgaggaagcttctggaggagtgggggagcctggaagccctcctcaagaacctggaccggctgaagcccgccatccgggagaagatcctggcccacatggacgatctgaagctctcctgggacctggccaaggtgcgcaccgacctgcccctggaggtggacttcgccaaaaggcgggagcccgaccgggagaggcttagggcctttctggagaggcttgagtttggcagcctcctccacgagttcggccttctggaaagccccaaggccctggaggaggccccctggcccccgccggaaggggccttcgtgggctttgtgctttcccgcaaggagcccatgtgggccgatcttctggccctggccgccgccagggggggccgggtccaccgggcccccgagccttataaagccctcagggacctgaaggaggcgcgggggcttctcgccaaagacctgagcgttctggccctgagggaaggccttggcctcccgcccggcgacgaccccatgctcctcgcctacctcctggacccttccaacaccacccccgagggggtggcccggcgctacggcggggagtggacggaggaggcgggggagcgggccgccctttccgagaggctcttcgccaacctgtgggggaggcttgagggggaggagaggctcctttggctttaccgggaggtggagaggcccctttccgctgtcctggcccacatggaggccacgggggtgcgcctggacgtggcctatctcagggccttgtccctggaggtggccgaggagatcgcccgcctcgaggccgaggtcttccgcctggccggccaccccttcaacctcaactcccgggaccagctggaaagggtcctctttgacgagctagggcttcccgccatcggcaagacggagaagaccggcaagcgctccaccagcgccgccgtcctggaggccctccgcgaggcccaccccatcgtggagaagatcctgcagtaccgggagctcaccaagctgaagagcacctacattgaccccttgccggacctcatccaccccaggacgggccgcctccacacccgcttcaaccagacggccacggccacgggcaggctaagtagctccgatcccaacctccagaacatccccgtccgcaccccgcttgggcagaggatccgccgggccttcatcgccgaggaggggtggctattggtggccctggactatagccagatagagctcagggtgctggcccacctctccggcgacgagaacctgatccgggtcttccaggaggggcgggacatccacacggagaccgccagctggatgttcggcgtcccccgggaggccgtggaccccctgatgcgccggaaagccaagaccatcaacttcggggtcctctacggcatgtcggcccaccgcctctcccaggagctagccatcccttacgaggaggcccaggccttcattgagcgctactttcagagcttccccaaggtgcgggcctggattgagaagaccctggaggagggcaggaggcgggggtacgtggagaccctcttcggccgccgccgctacgtgccagacctagaggcccgggtgaagagcgtgcgggaggcggccgagcgcatggccttcaacatgcccgtccagggcaccgccgccgacctcatgaagctggctatggtgaagctcttccccaggctggaggaaatgggggccaggatgctccttcaggtccacgacgagctggtcctcgaggccccaaaagagagggcggaggccgtggcccggctggccaaggaggtcatggagggggtgtatcccctggccgtgcccctggaggtggaggtggggataggggaggactggctctccgccaaggagtgataccaccccatgctggcccaagccagcatgggggccccggcaaaaggtttctggggaagttaccaggcatggtgggccgaaggaaacaggaaacaagggtatgagggttttttgccctaaagaaaggccagggggtcctcccgaaggaaggcttccagggggataccccctgggcccaggagtagcccctttcctccaaaggcctgggtgaaggcttttagccctttggtcctttgggaaggggcgcttttgacctccaaagccagaaggcgccttcccttcttcaagacgaagtcaacctcctggtccctttcccgccagtagtacacctcaaagcccccgtgggggccgtgggccagaaggtgggcgcccacggcggtttccacgagccgccccatgagggcggcgtccgcccacacctcctttggggaaagccccaagaccgccgtgatgagccccgtattaagggccaggagcttggggctcgaggcgcggcgccggaagggctcggcggcgtacttctgcag

SEQ ID NO: 3420 - DNA, 3026 bp, Artificial Sequence
  Description of Artificial Sequence: Synthetic DNA sequence of Thermus aquaticus DNA Polymerase A661E
atgagggggatgctgcccctctttgagcccaagggccgggtcctcctggtggacggccaccacctggcctaccgcaccttccacgccctgaagggcctcaccaccagccggggggagccggtgcaggcggtctacggcttcgccaagagcctcctcaaggccctcaaggaggacggggacgcggtgatcgtggtctttgacgccaaggccccctccttccgccacgaggcctacggggggtacaaggcgggccgggcccccacgccggaggactttccccggcaactcgccctcatcaaggagctggtggacctcctggggctggcgcgcctcgaggtcccgggctacgaggcggacgacgtcctggccagcctggccaagaaggcggaaaaggagggctacgaggtccgcatcctcaccgccgacaaagacctttaccagctcctttccgaccgcatccacgccctccaccccgaggggtacctcatcaccccggcctggctttgggaaaagtacggcctgaggcccgaccagtgggccgactaccgggccctgaccggggacgagtccgacaaccttcccggggtcaagggcatcggggagaagacggcgaggaagcttctggaggagtgggggagcctggaagccctcctcaagaacctggaccggctgaagcccgccatccgggagaagatcctggcccacatggacgatctgaagctctcctgggacctggccaaggtgcgcaccgacctgcccctggaggtggacttcgccaaaaggcgggagcccgaccgggagaggcttagggcctttctggagaggcttgagtttggcagcctcctccacgagttcggccttctggaaagccccaaggccctggaggaggccccctggcccccgccggaaggggccttcgtgggctttgtgctttcccgcaaggagcccatgtgggccgatcttctggccctggccgccgccagggggggccgggtccaccgggcccccgagccttataaagccctcagggacctgaaggaggcgcgggggcttctcgccaaagacctgagcgttctggccctgagggaaggccttggcctcccgcccggcgacgaccccatgctcctcgcctacctcctggacccttccaacaccacccccgagggggtggcccggcgctacggcggggagtggacggaggaggcgggggagcgggccgccctttccgagaggctcttcgccaacctgtgggggaggcttgagggggaggagaggctcctttggctttaccgggaggtggagaggcccctttccgctgtcctggcccacatggaggccacgggggtgcgcctggacgtggcctatctcagggccttgtccctggaggtggccgaggagatcgcccgcctcgaggccgaggtcttccgcctggccggccaccccttcaacctcaactcccgggaccagctggaaagggtcctctttgacgagctagggcttcccgccatcggcaagacggagaagaccggcaagcgctccaccagcgccgccgtcctggaggccctccgcgaggcccaccccatcgtggagaagatcctgcagtaccgggagctcaccaagctgaagagcacctacattgaccccttgccggacctcatccaccccaggacgggccgcctccacacccgcttcaaccagacggccacggccacgggcaggctaagtagctccgatcccaacctccagaacatccccgtccgcaccccgcttgggcagaggatccgccgggccttcatcgccgaggaggggtggctattggtggccctggactatagccagatagagctcagggtgctggcccacctctccggcgacgagaacctgatccgggtcttccaggaggggcgggacatccacacggagaccgccagctggatgttcggcgtcccccgggaggccgtggaccccctgatgcgccgggaagccaagaccatcaacttcggggtcctctacggcatgtcggcccaccgcctctcccaggagctagccatcccttacgaggaggcccaggccttcattgagcgctactttcagagcttccccaaggtgcgggcctggattgagaagaccctggaggagggcaggaggcgggggtacgtggagaccctcttcggccgccgccgctacgtgccagacctagaggcccgggtgaagagcgtgcgggaggcggccgagcgcatggccttcaacatgcccgtccagggcaccgccgccgacctcatgaagctggctatggtgaagctcttccccaggctggaggaaatgggggccaggatgctccttcaggtccacgacgagctggtcctcgaggccccaaaagagagggcggaggccgtggcccggctggccaaggaggtcatggagggggtgtatcccctggccgtgcccctggaggtggaggtggggataggggaggactggctctccgccaaggagtgataccaccccatgctggcccaagccagcatgggggccccggcaaaaggtttctggggaagttaccaggcatggtgggccgaaggaaacaggaaacaagggtatgagggttttttgccctaaagaaaggccagggggtcctcccgaaggaaggcttccagggggataccccctgggcccaggagtagcccctttcctccaaaggcctgggtgaaggcttttagccctttggtcctttgggaaggggcgcttttgacctccaaagccagaaggcgccttcccttcttcaagacgaagtcaacctcctggtccctttcccgccagtagtacacctcaaagcccccgtgggggccgtgggccagaaggtgggcgcccacggcggtttccacgagccgccccatgagggcggcgtccgcccacacctcctttggggaaagccccaagaccgccgtgatgagccccgtattaagggccaggagcttggggctcgaggcgcggcgccggaagggctcggcggcgtacttctgcag

SEQ ID NO: 3421 - DNA, 3026 bp, Artificial Sequence
  Description of Artificial Sequence: Synthetic DNA sequence of Thermus aquaticus DNA Polymerase A661D
atgagggggatgctgcccctctttgagcccaagggccgggtcctcctggtggacggccaccacctggcctaccgcaccttccacgccctgaagggcctcaccaccagccggggggagccggtgcaggcggtctacggcttcgccaagagcctcctcaaggccctcaaggaggacggggacgcggtgatcgtggtctttgacgccaaggccccctccttccgccacgaggcctacggggggtacaaggcgggccgggcccccacgccggaggactttccccggcaactcgccctcatcaaggagctggtggacctcctggggctggcgcgcctcgaggtcccgggctacgaggcggacgacgtcctggccagcctggccaagaaggcggaaaaggagggctacgaggtccgcatcctcaccgccgacaaagacctttaccagctcctttccgaccgcatccacgccctccaccccgaggggtacctcatcaccccggcctggctttgggaaaagtacggcctgaggcccgaccagtgggccgactaccgggccctgaccggggacgagtccgacaaccttcccggggtcaagggcatcggggagaagacggcgaggaagcttctggaggagtgggggagcctggaagccctcctcaagaacctggaccggctgaagcccgccatccgggagaagatcctggcccacatggacgatctgaagctctcctgggacctggccaaggtgcgcaccgacctgcccctggaggtggacttcgccaaaaggcgggagcccgaccgggagaggcttagggcctttctggagaggcttgagtttggcagcctcctccacgagttcggccttctggaaagccccaaggccctggaggaggccccctggcccccgccggaaggggccttcgtgggctttgtgctttcccgcaaggagcccatgtgggccgatcttctggccctggccgccgccagggggggccgggtccaccgggcccccgagccttataaagccctcagggacctgaaggaggcgcgggggcttctcgccaaagacctgagcgttctggccctgagggaaggccttggcctcccgcccggcgacgaccccatgctcctcgcctacctcctggacccttccaacaccacccccgagggggtggcccggcgctacggcggggagtggacggaggaggcgggggagcgggccgccctttccgagaggctcttcgccaacctgtgggggaggcttgagggggaggagaggctcctttggctttaccgggaggtggagaggcccctttccgctgtcctggcccacatggaggccacgggggtgcgcctggacgtggcctatctcagggccttgtccctggaggtggccgaggagatcgcccgcctcgaggccgaggtcttccgcctggccggccaccccttcaacctcaactcccgggaccagctggaaagggtcctctttgacgagctagggcttcccgccatcggcaagacggagaagaccggcaagcgctccaccagcgccgccgtcctggaggccctccgcgaggcccaccccatcgtggagaagatcctgcagtaccgggagctcaccaagctgaagagcacctacattgaccccttgccggacctcatccaccccaggacgggccgcctccacacccgcttcaaccagacggccacggccacgggcaggctaagtagctccgatcccaacctccagaacatccccgtccgcaccccgcttgggcagaggatccgccgggccttcatcgccgaggaggggtggctattggtggccctggactatagccagatagagctcagggtgctggcccacctctccggcgacgagaacctgatccgggtcttccaggaggggcgggacatccacacggagaccgccagctggatgttcggcgtcccccgggaggccgtggaccccctgatgcgccgggatgccaagaccatcaacttcggggtcctctacggcatgtcggcccaccgcctctcccaggagctagccatcccttacgaggaggcccaggccttcattgagcgctactttcagagcttccccaaggtgcgggcctggattgagaagaccctggaggagggcaggaggcgggggtacgtggagaccctcttcggccgccgccgctacgtgccagacctagaggcccgggtgaagagcgtgcgggaggcggccgagcgcatggccttcaacatgcccgtccagggcaccgccgccgacctcatgaagctggctatggtgaagctcttccccaggctggaggaaatgggggccaggatgctccttcaggtccacgacgagctggtcctcgaggccccaaaagagagggcggaggccgtggcccggctggccaaggaggtcatggagggggtgtatcccctggccgtgcccctggaggtggaggtggggataggggaggactggctctccgccaaggagtgataccaccccatgctggcccaagccagcatgggggccccggcaaaaggtttctggggaagttaccaggcatggtgggccgaaggaaacaggaaacaagggtatgagggttttttgccctaaagaaaggccagggggtcctcccgaaggaaggcttccagggggataccccctgggcccaggagtagcccctttcctccaaaggcctgggtgaaggcttttagccctttggtcctttgggaaggggcgcttttgacctccaaagccagaaggcgccttcccttcttcaagacgaagtcaacctcctggtccctttcccgccagtagtacacctcaaagcccccgtgggggccgtgggccagaaggtgggcgcccacggcggtttccacgagccgccccatgagggcggcgtccgcccacacctcctttggggaaagccccaagaccgccgtgatgagccccgtattaagggccaggagcttggggctcgaggcgcggcgccggaagggctcggcggcgtacttctgcag

SEQ ID NO: 3422 - DNA, 3026 bp, Artificial Sequence
  Description of Artificial Sequence: Synthetic DNA sequence of Thermus aquaticus DNA Polymerase A661F
atgagggggatgctgcccctctttgagcccaagggccgggtcctcctggtggacggccaccacctggcctaccgcaccttccacgccctgaagggcctcaccaccagccggggggagccggtgcaggcggtctacggcttcgccaagagcctcctcaaggccctcaaggaggacggggacgcggtgatcgtggtctttgacgccaaggccccctccttccgccacgaggcctacggggggtacaaggcgggccgggcccccacgccggaggactttccccggcaactcgccctcatcaaggagctggtggacctcctggggctggcgcgcctcgaggtcccgggctacgaggcggacgacgtcctggccagcctggccaagaaggcggaaaaggagggctacgaggtccgcatcctcaccgccgacaaagacctttaccagctcctttccgaccgcatccacgccctccaccccgaggggtacctcatcaccccggcctggctttgggaaaagtacggcctgaggcccgaccagtgggccgactaccgggccctgaccggggacgagtccgacaaccttcccggggtcaagggcatcggggagaagacggcgaggaagcttctggaggagtgggggagcctggaagccctcctcaagaacctggaccggctgaagcccgccatccgggagaagatcctggcccacatggacgatctgaagctctcctgggacctggccaaggtgcgcaccgacctgcccctggaggtggacttcgccaaaaggcgggagcccgaccgggagaggcttagggcctttctggagaggcttgagtttggcagcctcctccacgagttcggccttctggaaagccccaaggccctggaggaggccccctggcccccgccggaaggggccttcgtgggctttgtgctttcccgcaaggagcccatgtgggccgatcttctggccctggccgccgccagggggggccgggtccaccgggcccccgagccttataaagccctcagggacctgaaggaggcgcgggggcttctcgccaaagacctgagcgttctggccctgagggaaggccttggcctcccgcccggcgacgaccccatgctcctcgcctacctcctggacccttccaacaccacccccgagggggtggcccggcgctacggcggggagtggacggaggaggcgggggagcgggccgccctttccgagaggctcttcgccaacctgtgggggaggcttgagggggaggagaggctcctttggctttaccgggaggtggagaggcccctttccgctgtcctggcccacatggaggccacgggggtgcgcctggacgtggcctatctcagggccttgtccctggaggtggccgaggagatcgcccgcctcgaggccgaggtcttccgcctggccggccaccccttcaacctcaactcccgggaccagctggaaagggtcctctttgacgagctagggcttcccgccatcggcaagacggagaagaccggcaagcgctccaccagcgccgccgtcctggaggccctccgcgaggcccaccccatcgtggagaagatcctgcagtaccgggagctcaccaagctgaagagcacctacattgaccccttgccggacctcatccaccccaggacgggccgcctccacacccgcttcaaccagacggccacggccacgggcaggctaagtagctccgatcccaacctccagaacatccccgtccgcaccccgcttgggcagaggatccgccgggccttcatcgccgaggaggggtggctattggtggccctggactatagccagatagagctcagggtgctggcccacctctccggcgacgagaacctgatccgggtcttccaggaggggcgggacatccacacggagaccgccagctggatgttcggcgtcccccgggaggccgtggaccccctgatgcgccggtttgccaagaccatcaacttcggggtcctctacggcatgtcggcccaccgcctctcccaggagctagccatcccttacgaggaggcccaggccttcattgagcgctactttcagagcttccccaaggtgcgggcctggattgagaagaccctggaggagggcaggaggcgggggtacgtggagaccctcttcggccgccgccgctacgtgccagacctagaggcccgggtgaagagcgtgcgggaggcggccgagcgcatggccttcaacatgcccgtccagggcaccgccgccgacctcatgaagctggctatggtgaagctcttccccaggctggaggaaatgggggccaggatgctccttcaggtccacgacgagctggtcctcgaggccccaaaagagagggcggaggccgtggcccggctggccaaggaggtcatggagggggtgtatcccctggccgtgcccctggaggtggaggtggggataggggaggactggctctccgccaaggagtgataccaccccatgctggcccaagccagcatgggggccccggcaaaaggtttctggggaagttaccaggcatggtgggccgaaggaaacaggaaacaagggtatgagggttttttgccctaaagaaaggccagggggtcctcccgaaggaaggcttccagggggataccccctgggcccaggagtagcccctttcctccaaaggcctgggtgaaggcttttagccctttggtcctttgggaaggggcgcttttgacctccaaagccagaaggcgccttcccttcttcaagacgaagtcaacctcctggtccctttcccgccagtagtacacctcaaagcccccgtgggggccgtgggccagaaggtgggcgcccacggcggtttccacgagccgccccatgagggcggcgtccgcccacacctcctttggggaaagccccaagaccgccgtgatgagccccgtattaagggccaggagcttggggctcgaggcgcggcgccggaagggctcggcggcgtacttctgcag

SEQ ID NO: 3423 - DNA, 3026 bp, Artificial Sequence
  Description of Artificial Sequence: Synthetic DNA sequence of Thermus aquaticus DNA Polymerase A661S
atgagggggatgctgcccctctttgagcccaagggccgggtcctcctggtggacggccaccacctggcctaccgcaccttccacgccctgaagggcctcaccaccagccggggggagccggtgcaggcggtctacggcttcgccaagagcctcctcaaggccctcaaggaggacggggacgcggtgatcgtggtctttgacgccaaggccccctccttccgccacgaggcctacggggggtacaaggcgggccgggcccccacgccggaggactttccccggcaactcgccctcatcaaggagctggtggacctcctggggctggcgcgcctcgaggtcccgggctacgaggcggacgacgtcctggccagcctggccaagaaggcggaaaaggagggctacgaggtccgcatcctcaccgccgacaaagacctttaccagctcctttccgaccgcatccacgccctccaccccgaggggtacctcatcaccccggcctggctttgggaaaagtacggcctgaggcccgaccagtgggccgactaccgggccctgaccggggacgagtccgacaaccttcccggggtcaagggcatcggggagaagacggcgaggaagcttctggaggagtgggggagcctggaagccctcctcaagaacctggaccggctgaagcccgccatccgggagaagatcctggcccacatggacgatctgaagctctcctgggacctggccaaggtgcgcaccgacctgcccctggaggtggacttcgccaaaaggcgggagcccgaccgggagaggcttagggcctttctggagaggcttgagtttggcagcctcctccacgagttcggccttctggaaagccccaaggccctggaggaggccccctggcccccgccggaaggggccttcgtgggctttgtgctttcccgcaaggagcccatgtgggccgatcttctggccctggccgccgccagggggggccgggtccaccgggcccccgagccttataaagccctcagggacctgaaggaggcgcgggggcttctcgccaaagacctgagcgttctggccctgagggaaggccttggcctcccgcccggcgacgaccccatgctcctcgcctacctcctggacccttccaacaccacccccgagggggtggcccggcgctacggcggggagtggacggaggaggcgggggagcgggccgccctttccgagaggctcttcgccaacctgtgggggaggcttgagggggaggagaggctcctttggctttaccgggaggtggagaggcccctttccgctgtcctggcccacatggaggccacgggggtgcgcctggacgtggcctatctcagggccttgtccctggaggtggccgaggagatcgcccgcctcgaggccgaggtcttccgcctggccggccaccccttcaacctcaactcccgggaccagctggaaagggtcctctttgacgagctagggcttcccgccatcggcaagacggagaagaccggcaagcgctccaccagcgccgccgtcctggaggccctccgcgaggcccaccccatcgtggagaagatcctgcagtaccgggagctcaccaagctgaagagcacctacattgaccccttgccggacctcatccaccccaggacgggccgcctccacacccgcttcaaccagacggccacggccacgggcaggctaagtagctccgatcccaacctccagaacatccccgtccgcaccccgcttgggcagaggatccgccgggccttcatcgccgaggaggggtggctattggtggccctggactatagccagatagagctcagggtgctggcccacctctccggcgacgagaacctgatccgggtcttccaggaggggcgggacatccacacggagaccgccagctggatgttcggcgtcccccgggaggccgtggaccccctgatgcgccggtctgccaagaccatcaacttcggggtcctctacggcatgtcggcccaccgcctctcccaggagctagccatcccttacgaggaggcccaggccttcattgagcgctactttcagagcttccccaaggtgcgggcctggattgagaagaccctggaggagggcaggaggcgggggtacgtggagaccctcttcggccgccgccgctacgtgccagacctagaggcccgggtgaagagcgtgcgggaggcggccgagcgcatggccttcaacatgcccgtccagggcaccgccgccgacctcatgaagctggctatggtgaagctcttccccaggctggaggaaatgggggccaggatgctccttcaggtccacgacgagctggtcctcgaggccccaaaagagagggcggaggccgtggcccggctggccaaggaggtcatggagggggtgtatcccctggccgtgcccctggaggtggaggtggggataggggaggactggctctccgccaaggagtgataccaccccatgctggcccaagccagcatgggggccccggcaaaaggtttctggggaagttaccaggcatggtgggccgaaggaaacaggaaacaagggtatgagggttttttgccctaaagaaaggccagggggtcctcccgaaggaaggcttccagggggataccccctgggcccaggagtagcccctttcctccaaaggcctgggtgaaggcttttagccctttggtcctttgggaaggggcgcttttgacctccaaagccagaaggcgccttcccttcttcaagacgaagtcaacctcctggtccctttcccgccagtagtacacctcaaagcccccgtgggggccgtgggccagaaggtgggcgcccacggcggtttccacgagccgccccatgagggcggcgtccgcccacacctcctttggggaaagccccaagaccgccgtgatgagccccgtattaagggccaggagcttggggctcgaggcgcggcgccggaagggctcggcggcgtacttctgcag

SEQ ID NO: 3424 - DNA, 3026 bp, Artificial Sequence
  Description of Artificial Sequence: Synthetic DNA sequence of Thermus aquaticus DNA Polymerase A661Y
atgagggggatgctgcccctctttgagcccaagggccgggtcctcctggtggacggccaccacctggcctaccgcaccttccacgccctgaagggcctcaccaccagccggggggagccggtgcaggcggtctacggcttcgccaagagcctcctcaaggccctcaaggaggacggggacgcggtgatcgtggtctttgacgccaaggccccctccttccgccacgaggcctacggggggtacaaggcgggccgggcccccacgccggaggactttccccggcaactcgccctcatcaaggagctggtggacctcctggggctggcgcgcctcgaggtcccgggctacgaggcggacgacgtcctggccagcctggccaagaaggcggaaaaggagggctacgaggtccgcatcctcaccgccgacaaagacctttaccagctcctttccgaccgcatccacgccctccaccccgaggggtacctcatcaccccggcctggctttgggaaaagtacggcctgaggcccgaccagtgggccgactaccgggccctgaccggggacgagtccgacaaccttcccggggtcaagggcatcggggagaagacggcgaggaagcttctggaggagtgggggagcctggaagccctcctcaagaacctggaccggctgaagcccgccatccgggagaagatcctggcccacatggacgatctgaagctctcctgggacctggccaaggtgcgcaccgacctgcccctggaggtggacttcgccaaaaggcgggagcccgaccgggagaggcttagggcctttctggagaggcttgagtttggcagcctcctccacgagttcggccttctggaaagccccaaggccctggaggaggccccctggcccccgccggaaggggccttcgtgggctttgtgctttcccgcaaggagcccatgtgggccgatcttctggccctggccgccgccagggggggccgggtccaccgggcccccgagccttataaagccctcagggacctgaaggaggcgcgggggcttctcgccaaagacctgagcgttctggccctgagggaaggccttggcctcccgcccggcgacgaccccatgctcctcgcctacctcctggacccttccaacaccacccccgagggggtggcccggcgctacggcggggagtggacggaggaggcgggggagcgggccgccctttccgagaggctcttcgccaacctgtgggggaggcttgagggggaggagaggctcctttggctttaccgggaggtggagaggcccctttccgctgtcctggcccacatggaggccacgggggtgcgcctggacgtggcctatctcagggccttgtccctggaggtggccgaggagatcgcccgcctcgaggccgaggtcttccgcctggccggccaccccttcaacctcaactcccgggaccagctggaaagggtcctctttgacgagctagggcttcccgccatcggcaagacggagaagaccggcaagcgctccaccagcgccgccgtcctggaggccctccgcgaggcccaccccatcgtggagaagatcctgcagtaccgggagctcaccaagctgaagagcacctacattgaccccttgccggacctcatccaccccaggacgggccgcctccacacccgcttcaaccagacggccacggccacgggcaggctaagtagctccgatcccaacctccagaacatccccgtccgcaccccgcttgggcagaggatccgccgggccttcatcgccgaggaggggtggctattggtggccctggactatagccagatagagctcagggtgctggcccacctctccggcgacgagaacctgatccgggtcttccaggaggggcgggacatccacacggagaccgccagctggatgttcggcgtcccccgggaggccgtggaccccctgatgcgccggtatgccaagaccatcaacttcggggtcctctacggcatgtcggcccaccgcctctcccaggagctagccatcccttacgaggaggcccaggccttcattgagcgctactttcagagcttccccaaggtgcgggcctggattgagaagaccctggaggagggcaggaggcgggggtacgtggagaccctcttcggccgccgccgctacgtgccagacctagaggcccgggtgaagagcgtgcgggaggcggccgagcgcatggccttcaacatgcccgtccagggcaccgccgccgacctcatgaagctggctatggtgaagctcttccccaggctggaggaaatgggggccaggatgctccttcaggtccacgacgagctggtcctcgaggccccaaaagagagggcggaggccgtggcccggctggccaaggaggtcatggagggggtgtatcccctggccgtgcccctggaggtggaggtggggataggggaggactggctctccgccaaggagtgataccaccccatgctggcccaagccagcatgggggccccggcaaaaggtttctggggaagttaccaggcatggtgggccgaaggaaacaggaaacaagggtatgagggttttttgccctaaagaaaggccagggggtcctcccgaaggaaggcttccagggggataccccctgggcccaggagtagcccctttcctccaaaggcctgggtgaaggcttttagccctttggtcctttgggaaggggcgcttttgacctccaaagccagaaggcgccttcccttcttcaagacgaagtcaacctcctggtccctttcccgccagtagtacacctcaaagcccccgtgggggccgtgggccagaaggtgggcgcccacggcggtttccacgagccgccccatgagggcggcgtccgcccacacctcctttggggaaagccccaagaccgccgtgatgagccccgtattaagggccaggagcttggggctcgaggcgcggcgccggaagggctcggcggcgtacttctgcag

SEQ ID NO: 3425 - DNA, 3026 bp, Artificial Sequence
  Description of Artificial Sequence: Synthetic DNA sequence of Thermus aquaticus DNA Polymerase A661W
atgagggggatgctgcccctctttgagcccaagggccgggtcctcctggtggacggccaccacctggcctaccgcaccttccacgccctgaagggcctcaccaccagccggggggagccggtgcaggcggtctacggcttcgccaagagcctcctcaaggccctcaaggaggacggggacgcggtgatcgtggtctttgacgccaaggccccctccttccgccacgaggcctacggggggtacaaggcgggccgggcccccacgccggaggactttccccggcaactcgccctcatcaaggagctggtggacctcctggggctggcgcgcctcgaggtcccgggctacgaggcggacgacgtcctggccagcctggccaagaaggcggaaaaggagggctacgaggtccgcatcctcaccgccgacaaagacctttaccagctcctttccgaccgcatccacgccctccaccccgaggggtacctcatcaccccggcctggctttgggaaaagtacggcctgaggcccgaccagtgggccgactaccgggccctgaccggggacgagtccgacaaccttcccggggtcaagggcatcggggagaagacggcgaggaagcttctggaggagtgggggagcctggaagccctcctcaagaacctggaccggctgaagcccgccatccgggagaagatcctggcccacatggacgatctgaagctctcctgggacctggccaaggtgcgcaccgacctgcccctggaggtggacttcgccaaaaggcgggagcccgaccgggagaggcttagggcctttctggagaggcttgagtttggcagcctcctccacgagttcggccttctggaaagccccaaggccctggaggaggccccctggcccccgccggaaggggccttcgtgggctttgtgctttcccgcaaggagcccatgtgggccgatcttctggccctggccgccgccagggggggccgggtccaccgggcccccgagccttataaagccctcagggacctgaaggaggcgcgggggcttctcgccaaagacctgagcgttctggccctgagggaaggccttggcctcccgcccggcgacgaccccatgctcctcgcctacctcctggacccttccaacaccacccccgagggggtggcccggcgctacggcggggagtggacggaggaggcgggggagcgggccgccctttccgagaggctcttcgccaacctgtgggggaggcttgagggggaggagaggctcctttggctttaccgggaggtggagaggcccctttccgctgtcctggcccacatggaggccacgggggtgcgcctggacgtggcctatctcagggccttgtccctggaggtggccgaggagatcgcccgcctcgaggccgaggtcttccgcctggccggccaccccttcaacctcaactcccgggaccagctggaaagggtcctctttgacgagctagggcttcccgccatcggcaagacggagaagaccggcaagcgctccaccagcgccgccgtcctggaggccctccgcgaggcccaccccatcgtggagaagatcctgcagtaccgggagctcaccaagctgaagagcacctacattgaccccttgccggacctcatccaccccaggacgggccgcctccacacccgcttcaaccagacggccacggccacgggcaggctaagtagctccgatcccaacctccagaacatccccgtccgcaccccgcttgggcagaggatccgccgggccttcatcgccgaggaggggtggctattggtggccctggactatagccagatagagctcagggtgctggcccacctctccggcgacgagaacctgatccgggtcttccaggaggggcgggacatccacacggagaccgccagctggatgttcggcgtcccccgggaggccgtggaccccctgatgcgccggtgggccaagaccatcaacttcggggtcctctacggcatgtcggcccaccgcctctcccaggagctagccatcccttacgaggaggcccaggccttcattgagcgctactttcagagcttccccaaggtgcgggcctggattgagaagaccctggaggagggcaggaggcgggggtacgtggagaccctcttcggccgccgccgctacgtgccagacctagaggcccgggtgaagagcgtgcgggaggcggccgagcgcatggccttcaacatgcccgtccagggcaccgccgccgacctcatgaagctggctatggtgaagctcttccccaggctggaggaaatgggggccaggatgctccttcaggtccacgacgagctggtcctcgaggccccaaaagagagggcggaggccgtggcccggctggccaaggaggtcatggagggggtgtatcccctggccgtgcccctggaggtggaggtggggataggggaggactggctctccgccaaggagtgataccaccccatgctggcccaagccagcatgggggccccggcaaaaggtttctggggaagttaccaggcatggtgggccgaaggaaacaggaaacaagggtatgagggttttttgccctaaagaaaggccagggggtcctcccgaaggaaggcttccagggggataccccctgggcccaggagtagcccctttcctccaaaggcctgggtgaaggcttttagccctttggtcctttgggaaggggcgcttttgacctccaaagccagaaggcgccttcccttcttcaagacgaagtcaacctcctggtccctttcccgccagtagtacacctcaaagcccccgtgggggccgtgggccagaaggtgggcgcccacggcggtttccacgagccgccccatgagggcggcgtccgcccacacctcctttggggaaagccccaagaccgccgtgatgagccccgtattaagggccaggagcttggggctcgaggcgcggcgccggaagggctcggcggcgtacttctgcag

SEQ ID NO: 3426 - DNA, 3026 bp, Artificial Sequence
  Description of Artificial Sequence: Synthetic DNA sequence of Thermus aquaticus DNA Polymerase A661P
atgagggggatgctgcccctctttgagcccaagggccgggtcctcctggtggacggccaccacctggcctaccgcaccttccacgccctgaagggcctcaccaccagccggggggagccggtgcaggcggtctacggcttcgccaagagcctcctcaaggccctcaaggaggacggggacgcggtgatcgtggtctttgacgccaaggccccctccttccgccacgaggcctacggggggtacaaggcgggccgggcccccacgccggaggactttccccggcaactcgccctcatcaaggagctggtggacctcctggggctggcgcgcctcgaggtcccgggctacgaggcggacgacgtcctggccagcctggccaagaaggcggaaaaggagggctacgaggtccgcatcctcaccgccgacaaagacctttaccagctcctttccgaccgcatccacgccctccaccccgaggggtacctcatcaccccggcctggctttgggaaaagtacggcctgaggcccgaccagtgggccgactaccgggccctgaccggggacgagtccgacaaccttcccggggtcaagggcatcggggagaagacggcgaggaagcttctggaggagtgggggagcctggaagccctcctcaagaacctggaccggctgaagcccgccatccgggagaagatcctggcccacatggacgatctgaagctctcctgggacctggccaaggtgcgcaccgacctgcccctggaggtggacttcgccaaaaggcgggagcccgaccgggagaggcttagggcctttctggagaggcttgagtttggcagcctcctccacgagttcggccttctggaaagccccaaggccctggaggaggccccctggcccccgccggaaggggccttcgtgggctttgtgctttcccgcaaggagcccatgtgggccgatcttctggccctggccgccgccagggggggccgggtccaccgggcccccgagccttataaagccctcagggacctgaaggaggcgcgggggcttctcgccaaagacctgagcgttctggccctgagggaaggccttggcctcccgcccggcgacgaccccatgctcctcgcctacctcctggacccttccaacaccacccccgagggggtggcccggcgctacggcggggagtggacggaggaggcgggggagcgggccgccctttccgagaggctcttcgccaacctgtgggggaggcttgagggggaggagaggctcctttggctttaccgggaggtggagaggcccctttccgctgtcctggcccacatggaggccacgggggtgcgcctggacgtggcctatctcagggccttgtccctggaggtggccgaggagatcgcccgcctcgaggccgaggtcttccgcctggccggccaccccttcaacctcaactcccgggaccagctggaaagggtcctctttgacgagctagggcttcccgccatcggcaagacggagaagaccggcaagcgctccaccagcgccgccgtcctggaggccctccgcgaggcccaccccatcgtggagaagatcctgcagtaccgggagctcaccaagctgaagagcacctacattgaccccttgccggacctcatccaccccaggacgggccgcctccacacccgcttcaaccagacggccacggccacgggcaggctaagtagctccgatcccaacctccagaacatccccgtccgcaccccgcttgggcagaggatccgccgggccttcatcgccgaggaggggtggctattggtggccctggactatagccagatagagctcagggtgctggcccacctctccggcgacgagaacctgatccgggtcttccaggaggggcgggacatccacacggagaccgccagctggatgttcggcgtcccccgggaggccgtggaccccctgatgcgccggcctgccaagaccatcaacttcggggtcctctacggcatgtcggcccaccgcctctcccaggagctagccatcccttacgaggaggcccaggccttcattgagcgctactttcagagcttccccaaggtgcgggcctggattgagaagaccctggaggagggcaggaggcgggggtacgtggagaccctcttcggccgccgccgctacgtgccagacctagaggcccgggtgaagagcgtgcgggaggcggccgagcgcatggccttcaacatgcccgtccagggcaccgccgccgacctcatgaagctggctatggtgaagctcttccccaggctggaggaaatgggggccaggatgctccttcaggtccacgacgagctggtcctcgaggccccaaaagagagggcggaggccgtggcccggctggccaaggaggtcatggagggggtgtatcccctggccgtgcccctggaggtggaggtggggataggggaggactggctctccgccaaggagtgataccaccccatgctggcccaagccagcatgggggccccggcaaaaggtttctggggaagttaccaggcatggtgggccgaaggaaacaggaaacaagggtatgagggttttttgccctaaagaaaggccagggggtcctcccgaaggaaggcttccagggggataccccctgggcccaggagtagcccctttcctccaaaggcctgggtgaaggcttttagccctttggtcctttgggaaggggcgcttttgacctccaaagccagaaggcgccttcccttcttcaagacgaagtcaacctcctggtccctttcccgccagtagtacacctcaaagcccccgtgggggccgtgggccagaaggtgggcgcccacggcggtttccacgagccgccccatgagggcggcgtccgcccacacctcctttggggaaagccccaagaccgccgtgatgagccccgtattaagggccaggagcttggggctcgaggcgcggcgccggaagggctcggcggcgtacttctgcag

SEQ ID NO: 3427 - DNA, 3026 bp, Artificial Sequence
  Description of Artificial Sequence: Synthetic DNA sequence of Thermus aquaticus DNA Polymerase A661M
atgagggggatgctgcccctctttgagcccaagggccgggtcctcctggtggacggccaccacctggcctaccgcaccttccacgccctgaagggcctcaccaccagccggggggagccggtgcaggcggtctacggcttcgccaagagcctcctcaaggccctcaaggaggacggggacgcggtgatcgtggtctttgacgccaaggccccctccttccgccacgaggcctacggggggtacaaggcgggccgggcccccacgccggaggactttccccggcaactcgccctcatcaaggagctggtggacctcctggggctggcgcgcctcgaggtcccgggctacgaggcggacgacgtcctggccagcctggccaagaaggcggaaaaggagggctacgaggtccgcatcctcaccgccgacaaagacctttaccagctcctttccgaccgcatccacgccctccaccccgaggggtacctcatcaccccggcctggctttgggaaaagtacggcctgaggcccgaccagtgggccgactaccgggccctgaccggggacgagtccgacaaccttcccggggtcaagggcatcggggagaagacggcgaggaagcttctggaggagtgggggagcctggaagccctcctcaagaacctggaccggctgaagcccgccatccgggagaagatcctggcccacatggacgatctgaagctctcctgggacctggccaaggtgcgcaccgacctgcccctggaggtggacttcgccaaaaggcgggagcccgaccgggagaggcttagggcctttctggagaggcttgagtttggcagcctcctccacgagttcggccttctggaaagccccaaggccctggaggaggccccctggcccccgccggaaggggccttcgtgggctttgtgctttcccgcaaggagcccatgtgggccgatcttctggccctggccgccgccagggggggccgggtccaccgggcccccgagccttataaagccctcagggacctgaaggaggcgcgggggcttctcgccaaagacctgagcgttctggccctgagggaaggccttggcctcccgcccggcgacgaccccatgctcctcgcctacctcctggacccttccaacaccacccccgagggggtggcccggcgctacggcggggagtggacggaggaggcgggggagcgggccgccctttccgagaggctcttcgccaacctgtgggggaggcttgagggggaggagaggctcctttggctttaccgggaggtggagaggcccctttccgctgtcctggcccacatggaggccacgggggtgcgcctggacgtggcctatctcagggccttgtccctggaggtggccgaggagatcgcccgcctcgaggccgaggtcttccgcctggccggccaccccttcaacctcaactcccgggaccagctggaaagggtcctctttgacgagctagggcttcccgccatcggcaagacggagaagaccggcaagcgctccaccagcgccgccgtcctggaggccctccgcgaggcccaccccatcgtggagaagatcctgcagtaccgggagctcaccaagctgaagagcacctacattgaccccttgccggacctcatccaccccaggacgggccgcctccacacccgcttcaaccagacggccacggccacgggcaggctaagtagctccgatcccaacctccagaacatccccgtccgcaccccgcttgggcagaggatccgccgggccttcatcgccgaggaggggtggctattggtggccctggactatagccagatagagctcagggtgctggcccacctctccggcgacgagaacctgatccgggtcttccaggaggggcgggacatccacacggagaccgccagctggatgttcggcgtcccccgggaggccgtggaccccctgatgcgccggatggccaagaccatcaacttcggggtcctctacggcatgtcggcccaccgcctctcccaggagctagccatcccttacgaggaggcccaggccttcattgagcgctactttcagagcttccccaaggtgcgggcctggattgagaagaccctggaggagggcaggaggcgggggtacgtggagaccctcttcggccgccgccgctacgtgccagacctagaggcccgggtgaagagcgtgcgggaggcggccgagcgcatggccttcaacatgcccgtccagggcaccgccgccgacctcatgaagctggctatggtgaagctcttccccaggctggaggaaatgggggccaggatgctccttcaggtccacgacgagctggtcctcgaggccccaaaagagagggcggaggccgtggcccggctggccaaggaggtcatggagggggtgtatcccctggccgtgcccctggaggtggaggtggggataggggaggactggctctccgccaaggagtgataccaccccatgctggcccaagccagcatgggggccccggcaaaaggtttctggggaagttaccaggcatggtgggccgaaggaaacaggaaacaagggtatgagggttttttgccctaaagaaaggccagggggtcctcccgaaggaaggcttccagggggataccccctgggcccaggagtagcccctttcctccaaaggcctgggtgaaggcttttagccctttggtcctttgggaaggggcgcttttgacctccaaagccagaaggcgccttcccttcttcaagacgaagtcaacctcctggtccctttcccgccagtagtacacctcaaagcccccgtgggggccgtgggccagaaggtgggcgcccacggcggtttccacgagccgccccatgagggcggcgtccgcccacacctcctttggggaaagccccaagaccgccgtgatgagccccgtattaagggccaggagcttggggctcgaggcgcggcgccggaagggctcggcggcgtacttctgcag

SEQ ID NO: 3428 - DNA, 3026 bp, Artificial Sequence
  Description of Artificial Sequence: Synthetic DNA sequence of Thermus aquaticus DNA Polymerase A661T
atgagggggatgctgcccctctttgagcccaagggccgggtcctcctggtggacggccaccacctggcctaccgcaccttccacgccctgaagggcctcaccaccagccggggggagccggtgcaggcggtctacggcttcgccaagagcctcctcaaggccctcaaggaggacggggacgcggtgatcgtggtctttgacgccaaggccccctccttccgccacgaggcctacggggggtacaaggcgggccgggcccccacgccggaggactttccccggcaactcgccctcatcaaggagctggtggacctcctggggctggcgcgcctcgaggtcccgggctacgaggcggacgacgtcctggccagcctggccaagaaggcggaaaaggagggctacgaggtccgcatcctcaccgccgacaaagacctttaccagctcctttccgaccgcatccacgccctccaccccgaggggtacctcatcaccccggcctggctttgggaaaagtacggcctgaggcccgaccagtgggccgactaccgggccctgaccggggacgagtccgacaaccttcccggggtcaagggcatcggggagaagacggcgaggaagcttctggaggagtgggggagcctggaagccctcctcaagaacctggaccggctgaagcccgccatccgggagaagatcctggcccacatggacgatctgaagctctcctgggacctggccaaggtgcgcaccgacctgcccctggaggtggacttcgccaaaaggcgggagcccgaccgggagaggcttagggcctttctggagaggcttgagtttggcagcctcctccacgagttcggccttctggaaagccccaaggccctggaggaggccccctggcccccgccggaaggggccttcgtgggctttgtgctttcccgcaaggagcccatgtgggccgatcttctggccctggccgccgccagggggggccgggtccaccgggcccccgagccttataaagccctcagggacctgaaggaggcgcgggggcttctcgccaaagacctgagcgttctggccctgagggaaggccttggcctcccgcccggcgacgaccccatgctcctcgcctacctcctggacccttccaacaccacccccgagggggtggcccggcgctacggcggggagtggacggaggaggcgggggagcgggccgccctttccgagaggctcttcgccaacctgtgggggaggcttgagggggaggagaggctcctttggctttaccgggaggtggagaggcccctttccgctgtcctggcccacatggaggccacgggggtgcgcctggacgtggcctatctcagggccttgtccctggaggtggccgaggagatcgcccgcctcgaggccgaggtcttccgcctggccggccaccccttcaacctcaactcccgggaccagctggaaagggtcctctttgacgagctagggcttcccgccatcggcaagacggagaagaccggcaagcgctccaccagcgccgccgtcctggaggccctccgcgaggcccaccccatcgtggagaagatcctgcagtaccgggagctcaccaagctgaagagcacctacattgaccccttgccggacctcatccaccccaggacgggccgcctccacacccgcttcaaccagacggccacggccacgggcaggctaagtagctccgatcccaacctccagaacatccccgtccgcaccccgcttgggcagaggatccgccgggccttcatcgccgaggaggggtggctattggtggccctggactatagccagatagagctcagggtgctggcccacctctccggcgacgagaacctgatccgggtcttccaggaggggcgggacatccacacggagaccgccagctggatgttcggcgtcccccgggaggccgtggaccccctgatgcgccggactgccaagaccatcaacttcggggtcctctacggcatgtcggcccaccgcctctcccaggagctagccatcccttacgaggaggcccaggccttcattgagcgctactttcagagcttccccaaggtgcgggcctggattgagaagaccctggaggagggcaggaggcgggggtacgtggagaccctcttcggccgccgccgctacgtgccagacctagaggcccgggtgaagagcgtgcgggaggcggccgagcgcatggccttcaacatgcccgtccagggcaccgccgccgacctcatgaagctggctatggtgaagctcttccccaggctggaggaaatgggggccaggatgctccttcaggtccacgacgagctggtcctcgaggccccaaaagagagggcggaggccgtggcccggctggccaaggaggtcatggagggggtgtatcccctggccgtgcccctggaggtggaggtggggataggggaggactggctctccgccaaggagtgataccaccccatgctggcccaagccagcatgggggccccggcaaaaggtttctggggaagttaccaggcatggtgggccgaaggaaacaggaaacaagggtatgagggttttttgccctaaagaaaggccagggggtcctcccgaaggaaggcttccagggggataccccctgggcccaggagtagcccctttcctccaaaggcctgggtgaaggcttttagccctttggtcctttgggaaggggcgcttttgacctccaaagccagaaggcgccttcccttcttcaagacgaagtcaacctcctggtccctttcccgccagtagtacacctcaaagcccccgtgggggccgtgggccagaaggtgggcgcccacggcggtttccacgagccgccccatgagggcggcgtccgcccacacctcctttggggaaagccccaagaccgccgtgatgagccccgtattaagggccaggagcttggggctcgaggcgcggcgccggaagggctcggcggcgtacttctgcag

SEQ ID NO: 3429 - DNA, 3026 bp, Artificial Sequence
  Description of Artificial Sequence: Synthetic DNA sequence of Thermus aquaticus DNA Polymerase A661N
atgagggggatgctgcccctctttgagcccaagggccgggtcctcctggtggacggccaccacctggcctaccgcaccttccacgccctgaagggcctcaccaccagccggggggagccggtgcaggcggtctacggcttcgccaagagcctcctcaaggccctcaaggaggacggggacgcggtgatcgtggtctttgacgccaaggccccctccttccgccacgaggcctacggggggtacaaggcgggccgggcccccacgccggaggactttccccggcaactcgccctcatcaaggagctggtggacctcctggggctggcgcgcctcgaggtcccgggctacgaggcggacgacgtcctggccagcctggccaagaaggcggaaaaggagggctacgaggtccgcatcctcaccgccgacaaagacctttaccagctcctttccgaccgcatccacgccctccaccccgaggggtacctcatcaccccggcctggctttgggaaaagtacggcctgaggcccgaccagtgggccgactaccgggccctgaccggggacgagtccgacaaccttcccggggtcaagggcatcggggagaagacggcgaggaagcttctggaggagtgggggagcctggaagccctcctcaagaacctggaccggctgaagcccgccatccgggagaagatcctggcccacatggacgatctgaagctctcctgggacctggccaaggtgcgcaccgacctgcccctggaggtggacttcgccaaaaggcgggagcccgaccgggagaggcttagggcctttctggagaggcttgagtttggcagcctcctccacgagttcggccttctggaaagccccaaggccctggaggaggccccctggcccccgccggaaggggccttcgtgggctttgtgctttcccgcaaggagcccatgtgggccgatcttctggccctggccgccgccagggggggccgggtccaccgggcccccgagccttataaagccctcagggacctgaaggaggcgcgggggcttctcgccaaagacctgagcgttctggccctgagggaaggccttggcctcccgcccggcgacgaccccatgctcctcgcctacctcctggacccttccaacaccacccccgagggggtggcccggcgctacggcggggagtggacggaggaggcgggggagcgggccgccctttccgagaggctcttcgccaacctgtgggggaggcttgagggggaggagaggctcctttggctttaccgggaggtggagaggcccctttccgctgtcctggcccacatggaggccacgggggtgcgcctggacgtggcctatctcagggccttgtccctggaggtggccgaggagatcgcccgcctcgaggccgaggtcttccgcctggccggccaccccttcaacctcaactcccgggaccagctggaaagggtcctctttgacgagctagggcttcccgccatcggcaagacggagaagaccggcaagcgctccaccagcgccgccgtcctggaggccctccgcgaggcccaccccatcgtggagaagatcctgcagtaccgggagctcaccaagctgaagagcacctacattgaccccttgccggacctcatccaccccaggacgggccgcctccacacccgcttcaaccagacggccacggccacgggcaggctaagtagctccgatcccaacctccagaacatccccgtccgcaccccgcttgggcagaggatccgccgggccttcatcgccgaggaggggtggctattggtggccctggactatagccagatagagctcagggtgctggcccacctctccggcgacgagaacctgatccgggtcttccaggaggggcgggacatccacacggagaccgccagctggatgttcggcgtcccccgggaggccgtggaccccctgatgcgccggaatgccaagaccatcaacttcggggtcctctacggcatgtcggcccaccgcctctcccaggagctagccatcccttacgaggaggcccaggccttcattgagcgctactttcagagcttccccaaggtgcgggcctggattgagaagaccctggaggagggcaggaggcgggggtacgtggagaccctcttcggccgccgccgctacgtgccagacctagaggcccgggtgaagagcgtgcgggaggcggccgagcgcatggccttcaacatgcccgtccagggcaccgccgccgacctcatgaagctggctatggtgaagctcttccccaggctggaggaaatgggggccaggatgctccttcaggtccacgacgagctggtcctcgaggccccaaaagagagggcggaggccgtggcccggctggccaaggaggtcatggagggggtgtatcccctggccgtgcccctggaggtggaggtggggataggggaggactggctctccgccaaggagtgataccaccccatgctggcccaagccagcatgggggccccggcaaaaggtttctggggaagttaccaggcatggtgggccgaaggaaacaggaaacaagggtatgagggttttttgccctaaagaaaggccagggggtcctcccgaaggaaggcttccagggggataccccctgggcccaggagtagcccctttcctccaaaggcctgggtgaaggcttttagccctttggtcctttgggaaggggcgcttttgacctccaaagccagaaggcgccttcccttcttcaagacgaagtcaacctcctggtccctttcccgccagtagtacacctcaaagcccccgtgggggccgtgggccagaaggtgggcgcccacggcggtttccacgagccgccccatgagggcggcgtccgcccacacctcctttggggaaagccccaagaccgccgtgatgagccccgtattaagggccaggagcttggggctcgaggcgcggcgccggaagggctcggcggcgtacttctgcag

SEQ ID NO: 3430 - DNA, 3026 bp, Artificial Sequence
  Description of Artificial Sequence: Synthetic DNA sequence of Thermus aquaticus DNA Polymerase A661V
atgagggggatgctgcccctctttgagcccaagggccgggtcctcctggtggacggccaccacctggcctaccgcaccttccacgccctgaagggcctcaccaccagccggggggagccggtgcaggcggtctacggcttcgccaagagcctcctcaaggccctcaaggaggacggggacgcggtgatcgtggtctttgacgccaaggccccctccttccgccacgaggcctacggggggtacaaggcgggccgggcccccacgccggaggactttccccggcaactcgccctcatcaaggagctggtggacctcctggggctggcgcgcctcgaggtcccgggctacgaggcggacgacgtcctggccagcctggccaagaaggcggaaaaggagggctacgaggtccgcatcctcaccgccgacaaagacctttaccagctcctttccgaccgcatccacgccctccaccccgaggggtacctcatcaccccggcctggctttgggaaaagtacggcctgaggcccgaccagtgggccgactaccgggccctgaccggggacgagtccgacaaccttcccggggtcaagggcatcggggagaagacggcgaggaagcttctggaggagtgggggagcctggaagccctcctcaagaacctggaccggctgaagcccgccatccgggagaagatcctggcccacatggacgatctgaagctctcctgggacctggccaaggtgcgcaccgacctgcccctggaggtggacttcgccaaaaggcgggagcccgaccgggagaggcttagggcctttctggagaggcttgagtttggcagcctcctccacgagttcggccttctggaaagccccaaggccctggaggaggccccctggcccccgccggaaggggccttcgtgggctttgtgctttcccgcaaggagcccatgtgggccgatcttctggccctggccgccgccagggggggccgggtccaccgggcccccgagccttataaagccctcagggacctgaaggaggcgcgggggcttctcgccaaagacctgagcgttctggccctgagggaaggccttggcctcccgcccggcgacgaccccatgctcctcgcctacctcctggacccttccaacaccacccccgagggggtggcccggcgctacggcggggagtggacggaggaggcgggggagcgggccgccctttccgagaggctcttcgccaacctgtgggggaggcttgagggggaggagaggctcctttggctttaccgggaggtggagaggcccctttccgctgtcctggcccacatggaggccacgggggtgcgcctggacgtggcctatctcagggccttgtccctggaggtggccgaggagatcgcccgcctcgaggccgaggtcttccgcctggccggccaccccttcaacctcaactcccgggaccagctggaaagggtcctctttgacgagctagggcttcccgccatcggcaagacggagaagaccggcaagcgctccaccagcgccgccgtcctggaggccctccgcgaggcccaccccatcgtggagaagatcctgcagtaccgggagctcaccaagctgaagagcacctacattgaccccttgccggacctcatccaccccaggacgggccgcctccacacccgcttcaaccagacggccacggccacgggcaggctaagtagctccgatcccaacctccagaacatccccgtccgcaccccgcttgggcagaggatccgccgggccttcatcgccgaggaggggtggctattggtggccctggactatagccagatagagctcagggtgctggcccacctctccggcgacgagaacctgatccgggtcttccaggaggggcgggacatccacacggagaccgccagctggatgttcggcgtcccccgggaggccgtggaccccctgatgcgccgggtcgccaagaccatcaacttcggggtcctctacggcatgtcggcccaccgcctctcccaggagctagccatcccttacgaggaggcccaggccttcattgagcgctactttcagagcttccccaaggtgcgggcctggattgagaagaccctggaggagggcaggaggcgggggtacgtggagaccctcttcggccgccgccgctacgtgccagacctagaggcccgggtgaagagcgtgcgggaggcggccgagcgcatggccttcaacatgcccgtccagggcaccgccgccgacctcatgaagctggctatggtgaagctcttccccaggctggaggaaatgggggccaggatgctccttcaggtccacgacgagctggtcctcgaggccccaaaagagagggcggaggccgtggcccggctggccaaggaggtcatggagggggtgtatcccctggccgtgcccctggaggtggaggtggggataggggaggactggctctccgccaaggagtgataccaccccatgctggcccaagccagcatgggggccccggcaaaaggtttctggggaagttaccaggcatggtgggccgaaggaaacaggaaacaagggtatgagggttttttgccctaaagaaaggccagggggtcctcccgaaggaaggcttccagggggataccccctgggcccaggagtagcccctttcctccaaaggcctgggtgaaggcttttagccctttggtcctttgggaaggggcgcttttgacctccaaagccagaaggcgccttcccttcttcaagacgaagtcaacctcctggtccctttcccgccagtagtacacctcaaagcccccgtgggggccgtgggccagaaggtgggcgcccacggcggtttccacgagccgccccatgagggcggcgtccgcccacacctcctttggggaaagccccaagaccgccgtgatgagccccgtattaagggccaggagcttggggctcgaggcgcggcgccggaagggctcggcggcgtacttctgcag

SEQ ID NO: 3431 - DNA, 3026 bp, Artificial Sequence
  Description of Artificial Sequence: Synthetic DNA sequence of Thermus aquaticus DNA Polymerase K738A
atgagggggatgctgcccctctttgagcccaagggccgggtcctcctggtggacggccaccacctggcctaccgcaccttccacgccctgaagggcctcaccaccagccggggggagccggtgcaggcggtctacggcttcgccaagagcctcctcaaggccctcaaggaggacggggacgcggtgatcgtggtctttgacgccaaggccccctccttccgccacgaggcctacggggggtacaaggcgggccgggcccccacgccggaggactttccccggcaactcgccctcatcaaggagctggtggacctcctggggctggcgcgcctcgaggtcccgggctacgaggcggacgacgtcctggccagcctggccaagaaggcggaaaaggagggctacgaggtccgcatcctcaccgccgacaaagacctttaccagctcctttccgaccgcatccacgccctccaccccgaggggtacctcatcaccccggcctggctttgggaaaagtacggcctgaggcccgaccagtgggccgactaccgggccctgaccggggacgagtccgacaaccttcccggggtcaagggcatcggggagaagacggcgaggaagcttctggaggagtgggggagcctggaagccctcctcaagaacctggaccggctgaagcccgccatccgggagaagatcctggcccacatggacgatctgaagctctcctgggacctggccaaggtgcgcaccgacctgcccctggaggtggacttcgccaaaaggcgggagcccgaccgggagaggcttagggcctttctggagaggcttgagtttggcagcctcctccacgagttcggccttctggaaagccccaaggccctggaggaggccccctggcccccgccggaaggggccttcgtgggctttgtgctttcccgcaaggagcccatgtgggccgatcttctggccctggccgccgccagggggggccgggtccaccgggcccccgagccttataaagccctcagggacctgaaggaggcgcgggggcttctcgccaaagacctgagcgttctggccctgagggaaggccttggcctcccgcccggcgacgaccccatgctcctcgcctacctcctggacccttccaacaccacccccgagggggtggcccggcgctacggcggggagtggacggaggaggcgggggagcgggccgccctttccgagaggctcttcgccaacctgtgggggaggcttgagggggaggagaggctcctttggctttaccgggaggtggagaggcccctttccgctgtcctggcccacatggaggccacgggggtgcgcctggacgtggcctatctcagggccttgtccctggaggtggccgaggagatcgcccgcctcgaggccgaggtcttccgcctggccggccaccccttcaacctcaactcccgggaccagctggaaagggtcctctttgacgagctagggcttcccgccatcggcaagacggagaagaccggcaagcgctccaccagcgccgccgtcctggaggccctccgcgaggcccaccccatcgtggagaagatcctgcagtaccgggagctcaccaagctgaagagcacctacattgaccccttgccggacctcatccaccccaggacgggccgcctccacacccgcttcaaccagacggccacggccacgggcaggctaagtagctccgatcccaacctccagaacatccccgtccgcaccccgcttgggcagaggatccgccgggccttcatcgccgaggaggggtggctattggtggccctggactatagccagatagagctcagggtgctggcccacctctccggcgacgagaacctgatccgggtcttccaggaggggcgggacatccacacggagaccgccagctggatgttcggcgtcccccgggaggccgtggaccccctgatgcgccgggcggccaagaccatcaacttcggggtcctctacggcatgtcggcccaccgcctctcccaggagctagccatcccttacgaggaggcccaggccttcattgagcgctactttcagagcttccccaaggtgcgggcctggattgagaagaccctggaggagggcaggaggcgggggtacgtggagaccctcttcggccgccgccgctacgtgccagacctagaggcccgggtggctagcgtgcgggaggcggccgagcgcatggccttcaacatgcccgtccagggcaccgccgccgacctcatgaagctggctatggtgaagctcttccccaggctggaggaaatgggggccaggatgctccttcaggtccacgacgagctggtcctcgaggccccaaaagagagggcggaggccgtggcccggctggccaaggaggtcatggagggggtgtatcccctggccgtgcccctggaggtggaggtggggataggggaggactggctctccgccaaggagtgataccaccccatgctggcccaagccagcatgggggccccggcaaaaggtttctggggaagttaccaggcatggtgggccgaaggaaacaggaaacaagggtatgagggttttttgccctaaagaaaggccagggggtcctcccgaaggaaggcttccagggggataccccctgggcccaggagtagcccctttcctccaaaggcctgggtgaaggcttttagccctttggtcctttgggaaggggcgcttttgacctccaaagccagaaggcgccttcccttcttcaagacgaagtcaacctcctggtccctttcccgccagtagtacacctcaaagcccccgtgggggccgtgggccagaaggtgggcgcccacggcggtttccacgagccgccccatgagggcggcgtccgcccacacctcctttggggaaagccccaagaccgccgtgatgagccccgtattaagggccaggagcttggggctcgaggcgcggcgccggaagggctcggcggcgtacttctgcag

SEQ ID NO: 3432 - DNA, 3026 bp, Artificial Sequence
  Description of Artificial Sequence: Synthetic DNA sequence of Thermus aquaticus DNA Polymerase K738R
atgagggggatgctgcccctctttgagcccaagggccgggtcctcctggtggacggccaccacctggcctaccgcaccttccacgccctgaagggcctcaccaccagccggggggagccggtgcaggcggtctacggcttcgccaagagcctcctcaaggccctcaaggaggacggggacgcggtgatcgtggtctttgacgccaaggccccctccttccgccacgaggcctacggggggtacaaggcgggccgggcccccacgccggaggactttccccggcaactcgccctcatcaaggagctggtggacctcctggggctggcgcgcctcgaggtcccgggctacgaggcggacgacgtcctggccagcctggccaagaaggcggaaaaggagggctacgaggtccgcatcctcaccgccgacaaagacctttaccagctcctttccgaccgcatccacgccctccaccccgaggggtacctcatcaccccggcctggctttgggaaaagtacggcctgaggcccgaccagtgggccgactaccgggccctgaccggggacgagtccgacaaccttcccggggtcaagggcatcggggagaagacggcgaggaagcttctggaggagtgggggagcctggaagccctcctcaagaacctggaccggctgaagcccgccatccgggagaagatcctggcccacatggacgatctgaagctctcctgggacctggccaaggtgcgcaccgacctgcccctggaggtggacttcgccaaaaggcgggagcccgaccgggagaggcttagggcctttctggagaggcttgagtttggcagcctcctccacgagttcggccttctggaaagccccaaggccctggaggaggccccctggcccccgccggaaggggccttcgtgggctttgtgctttcccgcaaggagcccatgtgggccgatcttctggccctggccgccgccagggggggccgggtccaccgggcccccgagccttataaagccctcagggacctgaaggaggcgcgggggcttctcgccaaagacctgagcgttctggccctgagggaaggccttggcctcccgcccggcgacgaccccatgctcctcgcctacctcctggacccttccaacaccacccccgagggggtggcccggcgctacggcggggagtggacggaggaggcgggggagcgggccgccctttccgagaggctcttcgccaacctgtgggggaggcttgagggggaggagaggctcctttggctttaccgggaggtggagaggcccctttccgctgtcctggcccacatggaggccacgggggtgcgcctggacgtggcctatctcagggccttgtccctggaggtggccgaggagatcgcccgcctcgaggccgaggtcttccgcctggccggccaccccttcaacctcaactcccgggaccagctggaaagggtcctctttgacgagctagggcttcccgccatcggcaagacggagaagaccggcaagcgctccaccagcgccgccgtcctggaggccctccgcgaggcccaccccatcgtggagaagatcctgcagtaccgggagctcaccaagctgaagagcacctacattgaccccttgccggacctcatccaccccaggacgggccgcctccacacccgcttcaaccagacggccacggccacgggcaggctaagtagctccgatcccaacctccagaacatccccgtccgcaccccgcttgggcagaggatccgccgggccttcatcgccgaggaggggtggctattggtggccctggactatagccagatagagctcagggtgctggcccacctctccggcgacgagaacctgatccgggtcttccaggaggggcgggacatccacacggagaccgccagctggatgttcggcgtcccccgggaggccgtggaccccctgatgcgccgggcggccaagaccatcaacttcggggtcctctacggcatgtcggcccaccgcctctcccaggagctagccatcccttacgaggaggcccaggccttcattgagcgctactttcagagcttccccaaggtgcgggcctggattgagaagaccctggaggagggcaggaggcgggggtacgtggagaccctcttcggccgccgccgctacgtgccagacctagaggcccgggtgcgaagcgtgcgggaggcggccgagcgcatggccttcaacatgcccgtccagggcaccgccgccgacctcatgaagctggctatggtgaagctcttccccaggctggaggaaatgggggccaggatgctccttcaggtccacgacgagctggtcctcgaggccccaaaagagagggcggaggccgtggcccggctggccaaggaggtcatggagggggtgtatcccctggccgtgcccctggaggtggaggtggggataggggaggactggctctccgccaaggagtgataccaccccatgctggcccaagccagcatgggggccccggcaaaaggtttctggggaagttaccaggcatggtgggccgaaggaaacaggaaacaagggtatgagggttttttgccctaaagaaaggccagggggtcctcccgaaggaaggcttccagggggataccccctgggcccaggagtagcccctttcctccaaaggcctgggtgaaggcttttagccctttggtcctttgggaaggggcgcttttgacctccaaagccagaaggcgccttcccttcttcaagacgaagtcaacctcctggtccctttcccgccagtagtacacctcaaagcccccgtgggggccgtgggccagaaggtgggcgcccacggcggtttccacgagccgccccatgagggcggcgtccgcccacacctcctttggggaaagccccaagaccgccgtgatgagccccgtattaagggccaggagcttggggctcgaggcgcggcgccggaagggctcggcggcgtacttctgcag

SEQ ID NO: 3433 - DNA, 3026 bp, Artificial Sequence
  Description of Artificial Sequence: Synthetic DNA sequence of Thermus aquaticus DNA Polymerase K738C
atgagggggatgctgcccctctttgagcccaagggccgggtcctcctggtggacggccaccacctggcctaccgcaccttccacgccctgaagggcctcaccaccagccggggggagccggtgcaggcggtctacggcttcgccaagagcctcctcaaggccctcaaggaggacggggacgcggtgatcgtggtctttgacgccaaggccccctccttccgccacgaggcctacggggggtacaaggcgggccgggcccccacgccggaggactttccccggcaactcgccctcatcaaggagctggtggacctcctggggctggcgcgcctcgaggtcccgggctacgaggcggacgacgtcctggccagcctggccaagaaggcggaaaaggagggctacgaggtccgcatcctcaccgccgacaaagacctttaccagctcctttccgaccgcatccacgccctccaccccgaggggtacctcatcaccccggcctggctttgggaaaagtacggcctgaggcccgaccagtgggccgactaccgggccctgaccggggacgagtccgacaaccttcccggggtcaagggcatcggggagaagacggcgaggaagcttctggaggagtgggggagcctggaagccctcctcaagaacctggaccggctgaagcccgccatccgggagaagatcctggcccacatggacgatctgaagctctcctgggacctggccaaggtgcgcaccgacctgcccctggaggtggacttcgccaaaaggcgggagcccgaccgggagaggcttagggcctttctggagaggcttgagtttggcagcctcctccacgagttcggccttctggaaagccccaaggccctggaggaggccccctggcccccgccggaaggggccttcgtgggctttgtgctttcccgcaaggagcccatgtgggccgatcttctggccctggccgccgccagggggggccgggtccaccgggcccccgagccttataaagccctcagggacctgaaggaggcgcgggggcttctcgccaaagacctgagcgttctggccctgagggaaggccttggcctcccgcccggcgacgaccccatgctcctcgcctacctcctggacccttccaacaccacccccgagggggtggcccggcgctacggcggggagtggacggaggaggcgggggagcgggccgccctttccgagaggctcttcgccaacctgtgggggaggcttgagggggaggagaggctcctttggctttaccgggaggtggagaggcccctttccgctgtcctggcccacatggaggccacgggggtgcgcctggacgtggcctatctcagggccttgtccctggaggtggccgaggagatcgcccgcctcgaggccgaggtcttccgcctggccggccaccccttcaacctcaactcccgggaccagctggaaagggtcctctttgacgagctagggcttcccgccatcggcaagacggagaagaccggcaagcgctccaccagcgccgccgtcctggaggccctccgcgaggcccaccccatcgtggagaagatcctgcagtaccgggagctcaccaagctgaagagcacctacattgaccccttgccggacctcatccaccccaggacgggccgcctccacacccgcttcaaccagacggccacggccacgggcaggctaagtagctccgatcccaacctccagaacatccccgtccgcaccccgcttgggcagaggatccgccgggccttcatcgccgaggaggggtggctattggtggccctggactatagccagatagagctcagggtgctggcccacctctccggcgacgagaacctgatccgggtcttccaggaggggcgggacatccacacggagaccgccagctggatgttcggcgtcccccgggaggccgtggaccccctgatgcgccgggcggccaagaccatcaacttcggggtcctctacggcatgtcggcccaccgcctctcccaggagctagccatcccttacgaggaggcccaggccttcattgagcgctactttcagagcttccccaaggtgcgggcctggattgagaagaccctggaggagggcaggaggcgggggtacgtggagaccctcttcggccgccgccgctacgtgccagacctagaggcccgggtgtgtagcgtgcgggaggcggccgagcgcatggccttcaacatgcccgtccagggcaccgccgccgacctcatgaagctggctatggtgaagctcttccccaggctggaggaaatgggggccaggatgctccttcaggtccacgacgagctggtcctcgaggccccaaaagagagggcggaggccgtggcccggctggccaaggaggtcatggagggggtgtatcccctggccgtgcccctggaggtggaggtggggataggggaggactggctctccgccaaggagtgataccaccccatgctggcccaagccagcatgggggccccggcaaaaggtttctggggaagttaccaggcatggtgggccgaaggaaacaggaaacaagggtatgagggttttttgccctaaagaaaggccagggggtcctcccgaaggaaggcttccagggggataccccctgggcccaggagtagcccctttcctccaaaggcctgggtgaaggcttttagccctttggtcctttgggaaggggcgcttttgacctccaaagccagaaggcgccttcccttcttcaagacgaagtcaacctcctggtccctttcccgccagtagtacacctcaaagcccccgtgggggccgtgggccagaaggtgggcgcccacggcggtttccacgagccgccccatgagggcggcgtccgcccacacctcctttggggaaagccccaagaccgccgtgatgagccccgtattaagggccaggagcttggggctcgaggcgcggcgccggaagggctcggcggcgtacttctgcag

SEQ ID NO: 3434 - DNA, 3026 bp, Artificial Sequence
  Description of Artificial Sequence: Synthetic DNA sequence of Thermus aquaticus DNA Polymerase K738G
atgagggggatgctgcccctctttgagcccaagggccgggtcctcctggtggacggccaccacctggcctaccgcaccttccacgccctgaagggcctcaccaccagccggggggagccggtgcaggcggtctacggcttcgccaagagcctcctcaaggccctcaaggaggacggggacgcggtgatcgtggtctttgacgccaaggccccctccttccgccacgaggcctacggggggtacaaggcgggccgggcccccacgccggaggactttccccggcaactcgccctcatcaaggagctggtggacctcctggggctggcgcgcctcgaggtcccgggctacgaggcggacgacgtcctggccagcctggccaagaaggcggaaaaggagggctacgaggtccgcatcctcaccgccgacaaagacctttaccagctcctttccgaccgcatccacgccctccaccccgaggggtacctcatcaccccggcctggctttgggaaaagtacggcctgaggcccgaccagtgggccgactaccgggccctgaccggggacgagtccgacaaccttcccggggtcaagggcatcggggagaagacggcgaggaagcttctggaggagtgggggagcctggaagccctcctcaagaacctggaccggctgaagcccgccatccgggagaagatcctggcccacatggacgatctgaagctctcctgggacctggccaaggtgcgcaccgacctgcccctggaggtggacttcgccaaaaggcgggagcccgaccgggagaggcttagggcctttctggagaggcttgagtttggcagcctcctccacgagttcggccttctggaaagccccaaggccctggaggaggccccctggcccccgccggaaggggccttcgtgggctttgtgctttcccgcaaggagcccatgtgggccgatcttctggccctggccgccgccagggggggccgggtccaccgggcccccgagccttataaagccctcagggacctgaaggaggcgcgggggcttctcgccaaagacctgagcgttctggccctgagggaaggccttggcctcccgcccggcgacgaccccatgctcctcgcctacctcctggacccttccaacaccacccccgagggggtggcccggcgctacggcggggagtggacggaggaggcgggggagcgggccgccctttccgagaggctcttcgccaacctgtgggggaggcttgagggggaggagaggctcctttggctttaccgggaggtggagaggcccctttccgctgtcctggcccacatggaggccacgggggtgcgcctggacgtggcctatctcagggccttgtccctggaggtggccgaggagatcgcccgcctcgaggccgaggtcttccgcctggccggccaccccttcaacctcaactcccgggaccagctggaaagggtcctctttgacgagctagggcttcccgccatcggcaagacggagaagaccggcaagcgctccaccagcgccgccgtcctggaggccctccgcgaggcccaccccatcgtggagaagatcctgcagtaccgggagctcaccaagctgaagagcacctacattgaccccttgccggacctcatccaccccaggacgggccgcctccacacccgcttcaaccagacggccacggccacgggcaggctaagtagctccgatcccaacctccagaacatccccgtccgcaccccgcttgggcagaggatccgccgggccttcatcgccgaggaggggtggctattggtggccctggactatagccagatagagctcagggtgctggcccacctctccggcgacgagaacctgatccgggtcttccaggaggggcgggacatccacacggagaccgccagctggatgttcggcgtcccccgggaggccgtggaccccctgatgcgccgggcggccaagaccatcaacttcggggtcctctacggcatgtcggcccaccgcctctcccaggagctagccatcccttacgaggaggcccaggccttcattgagcgctactttcagagcttccccaaggtgcgggcctggattgagaagaccctggaggagggcaggaggcgggggtacgtggagaccctcttcggccgccgccgctacgtgccagacctagaggcccgggtgggtagcgtgcgggaggcggccgagcgcatggccttcaacatgcccgtccagggcaccgccgccgacctcatgaagctggctatggtgaagctcttccccaggctggaggaaatgggggccaggatgctccttcaggtccacgacgagctggtcctcgaggccccaaaagagagggcggaggccgtggcccggctggccaaggaggtcatggagggggtgtatcccctggccgtgcccctggaggtggaggtggggataggggaggactggctctccgccaaggagtgataccaccccatgctggcccaagccagcatgggggccccggcaaaaggtttctggggaagttaccaggcatggtgggccgaaggaaacaggaaacaagggtatgagggttttttgccctaaagaaaggccagggggtcctcccgaaggaaggcttccagggggataccccctgggcccaggagtagcccctttcctccaaaggcctgggtgaaggcttttagccctttggtcctttgggaaggggcgcttttgacctccaaagccagaaggcgccttcccttcttcaagacgaagtcaacctcctggtccctttcccgccagtagtacacctcaaagcccccgtgggggccgtgggccagaaggtgggcgcccacggcggtttccacgagccgccccatgagggcggcgtccgcccacacctcctttggggaaagccccaagaccgccgtgatgagccccgtattaagggccaggagcttggggctcgaggcgcggcgccggaagggctcggcggcgtacttctgcag

SEQ ID NO: 3435 - DNA, 3026 bp, Artificial Sequence
  Description of Artificial Sequence: Synthetic DNA sequence of Thermus aquaticus DNA Polymerase K738Q
atgagggggatgctgcccctctttgagcccaagggccgggtcctcctggtggacggccaccacctggcctaccgcaccttccacgccctgaagggcctcaccaccagccggggggagccggtgcaggcggtctacggcttcgccaagagcctcctcaaggccctcaaggaggacggggacgcggtgatcgtggtctttgacgccaaggccccctccttccgccacgaggcctacggggggtacaaggcgggccgggcccccacgccggaggactttccccggcaactcgccctcatcaaggagctggtggacctcctggggctggcgcgcctcgaggtcccgggctacgaggcggacgacgtcctggccagcctggccaagaaggcggaaaaggagggctacgaggtccgcatcctcaccgccgacaaagacctttaccagctcctttccgaccgcatccacgccctccaccccgaggggtacctcatcaccccggcctggctttgggaaaagtacggcctgaggcccgaccagtgggccgactaccgggccctgaccggggacgagtccgacaaccttcccggggtcaagggcatcggggagaagacggcgaggaagcttctggaggagtgggggagcctggaagccctcctcaagaacctggaccggctgaagcccgccatccgggagaagatcctggcccacatggacgatctgaagctctcctgggacctggccaaggtgcgcaccgacctgcccctggaggtggacttcgccaaaaggcgggagcccgaccgggagaggcttagggcctttctggagaggcttgagtttggcagcctcctccacgagttcggccttctggaaagccccaaggccctggaggaggccccctggcccccgccggaaggggccttcgtgggctttgtgctttcccgcaaggagcccatgtgggccgatcttctggccctggccgccgccagggggggccgggtccaccgggcccccgagccttataaagccctcagggacctgaaggaggcgcgggggcttctcgccaaagacctgagcgttctggccctgagggaaggccttggcctcccgcccggcgacgaccccatgctcctcgcctacctcctggacccttccaacaccacccccgagggggtggcccggcgctacggcggggagtggacggaggaggcgggggagcgggccgccctttccgagaggctcttcgccaacctgtgggggaggcttgagggggaggagaggctcctttggctttaccgggaggtggagaggcccctttccgctgtcctggcccacatggaggccacgggggtgcgcctggacgtggcctatctcagggccttgtccctggaggtggccgaggagatcgcccgcctcgaggccgaggtcttccgcctggccggccaccccttcaacctcaactcccgggaccagctggaaagggtcctctttgacgagctagggcttcccgccatcggcaagacggagaagaccggcaagcgctccaccagcgccgccgtcctggaggccctccgcgaggcccaccccatcgtggagaagatcctgcagtaccgggagctcaccaagctgaagagcacctacattgaccccttgccggacctcatccaccccaggacgggccgcctccacacccgcttcaaccagacggccacggccacgggcaggctaagtagctccgatcccaacctccagaacatccccgtccgcaccccgcttgggcagaggatccgccgggccttcatcgccgaggaggggtggctattggtggccctggactatagccagatagagctcagggtgctggcccacctctccggcgacgagaacctgatccgggtcttccaggaggggcgggacatccacacggagaccgccagctggatgttcggcgtcccccgggaggccgtggaccccctgatgcgccgggcggccaagaccatcaacttcggggtcctctacggcatgtcggcccaccgcctctcccaggagctagccatcccttacgaggaggcccaggccttcattgagcgctactttcagagcttccccaaggtgcgggcctggattgagaagaccctggaggagggcaggaggcgggggtacgtggagaccctcttcggccgccgccgctacgtgccagacctagaggcccgggtgcaaagcgtgcgggaggcggccgagcgcatggccttcaacatgcccgtccagggcaccgccgccgacctcatgaagctggctatggtgaagctcttccccaggctggaggaaatgggggccaggatgctccttcaggtccacgacgagctggtcctcgaggccccaaaagagagggcggaggccgtggcccggctggccaaggaggtcatggagggggtgtatcccctggccgtgcccctggaggtggaggtggggataggggaggactggctctccgccaaggagtgataccaccccatgctggcccaagccagcatgggggccccggcaaaaggtttctggggaagttaccaggcatggtgggccgaaggaaacaggaaacaagggtatgagggttttttgccctaaagaaaggccagggggtcctcccgaaggaaggcttccagggggataccccctgggcccaggagtagcccctttcctccaaaggcctgggtgaaggcttttagccctttggtcctttgggaaggggcgcttttgacctccaaagccagaaggcgccttcccttcttcaagacgaagtcaacctcctggtccctttcccgccagtagtacacctcaaagcccccgtgggggccgtgggccagaaggtgggcgcccacggcggtttccacgagccgccccatgagggcggcgtccgcccacacctcctttggggaaagccccaagaccgccgtgatgagccccgtattaagggccaggagcttggggctcgaggcgcggcgccggaagggctcggcggcgtacttctgcag

SEQ ID NO: 3436 - DNA, 3026 bp, Artificial Sequence
  Description of Artificial Sequence: Synthetic DNA sequence of Thermus aquaticus DNA Polymerase K738H
atgagggggatgctgcccctctttgagcccaagggccgggtcctcctggtggacggccaccacctggcctaccgcaccttccacgccctgaagggcctcaccaccagccggggggagccggtgcaggcggtctacggcttcgccaagagcctcctcaaggccctcaaggaggacggggacgcggtgatcgtggtctttgacgccaaggccccctccttccgccacgaggcctacggggggtacaaggcgggccgggcccccacgccggaggactttccccggcaactcgccctcatcaaggagctggtggacctcctggggctggcgcgcctcgaggtcccgggctacgaggcggacgacgtcctggccagcctggccaagaaggcggaaaaggagggctacgaggtccgcatcctcaccgccgacaaagacctttaccagctcctttccgaccgcatccacgccctccaccccgaggggtacctcatcaccccggcctggctttgggaaaagtacggcctgaggcccgaccagtgggccgactaccgggccctgaccggggacgagtccgacaaccttcccggggtcaagggcatcggggagaagacggcgaggaagcttctggaggagtgggggagcctggaagccctcctcaagaacctggaccggctgaagcccgccatccgggagaagatcctggcccacatggacgatctgaagctctcctgggacctggccaaggtgcgcaccgacctgcccctggaggtggacttcgccaaaaggcgggagcccgaccgggagaggcttagggcctttctggagaggcttgagtttggcagcctcctccacgagttcggccttctggaaagccccaaggccctggaggaggccccctggcccccgccggaaggggccttcgtgggctttgtgctttcccgcaaggagcccatgtgggccgatcttctggccctggccgccgccagggggggccgggtccaccgggcccccgagccttataaagccctcagggacctgaaggaggcgcgggggcttctcgccaaagacctgagcgttctggccctgagggaaggccttggcctcccgcccggcgacgaccccatgctcctcgcctacctcctggacccttccaacaccacccccgagggggtggcccggcgctacggcggggagtggacggaggaggcgggggagcgggccgccctttccgagaggctcttcgccaacctgtgggggaggcttgagggggaggagaggctcctttggctttaccgggaggtggagaggcccctttccgctgtcctggcccacatggaggccacgggggtgcgcctggacgtggcctatctcagggccttgtccctggaggtggccgaggagatcgcccgcctcgaggccgaggtcttccgcctggccggccaccccttcaacctcaactcccgggaccagctggaaagggtcctctttgacgagctagggcttcccgccatcggcaagacggagaagaccggcaagcgctccaccagcgccgccgtcctggaggccctccgcgaggcccaccccatcgtggagaagatcctgcagtaccgggagctcaccaagctgaagagcacctacattgaccccttgccggacctcatccaccccaggacgggccgcctccacacccgcttcaaccagacggccacggccacgggcaggctaagtagctccgatcccaacctccagaacatccccgtccgcaccccgcttgggcagaggatccgccgggccttcatcgccgaggaggggtggctattggtggccctggactatagccagatagagctcagggtgctggcccacctctccggcgacgagaacctgatccgggtcttccaggaggggcgggacatccacacggagaccgccagctggatgttcggcgtcccccgggaggccgtggaccccctgatgcgccgggcggccaagaccatcaacttcggggtcctctacggcatgtcggcccaccgcctctcccaggagctagccatcccttacgaggaggcccaggccttcattgagcgctactttcagagcttccccaaggtgcgggcctggattgagaagaccctggaggagggcaggaggcgggggtacgtggagaccctcttcggccgccgccgctacgtgccagacctagaggcccgggtgcatagcgtgcgggaggcggccgagcgcatggccttcaacatgcccgtccagggcaccgccgccgacctcatgaagctggctatggtgaagctcttccccaggctggaggaaatgggggccaggatgctccttcaggtccacgacgagctggtcctcgaggccccaaaagagagggcggaggccgtggcccggctggccaaggaggtcatggagggggtgtatcccctggccgtgcccctggaggtggaggtggggataggggaggactggctctccgccaaggagtgataccaccccatgctggcccaagccagcatgggggccccggcaaaaggtttctggggaagttaccaggcatggtgggccgaaggaaacaggaaacaagggtatgagggttttttgccctaaagaaaggccagggggtcctcccgaaggaaggcttccagggggataccccctgggcccaggagtagcccctttcctccaaaggcctgggtgaaggcttttagccctttggtcctttgggaaggggcgcttttgacctccaaagccagaaggcgccttcccttcttcaagacgaagtcaacctcctggtccctttcccgccagtagtacacctcaaagcccccgtgggggccgtgggccagaaggtgggcgcccacggcggtttccacgagccgccccatgagggcggcgtccgcccacacctcctttggggaaagccccaagaccgccgtgatgagccccgtattaagggccaggagcttggggctcgaggcgcggcgccggaagggctcggcggcgtacttctgcag

SEQ ID NO: 3437 - DNA, 3026 bp, Artificial Sequence
  Description of Artificial Sequence: Synthetic DNA sequence of Thermus aquaticus DNA Polymerase K738I
atgagggggatgctgcccctctttgagcccaagggccgggtcctcctggtggacggccaccacctggcctaccgcaccttccacgccctgaagggcctcaccaccagccggggggagccggtgcaggcggtctacggcttcgccaagagcctcctcaaggccctcaaggaggacggggacgcggtgatcgtggtctttgacgccaaggccccctccttccgccacgaggcctacggggggtacaaggcgggccgggcccccacgccggaggactttccccggcaactcgccctcatcaaggagctggtggacctcctggggctggcgcgcctcgaggtcccgggctacgaggcggacgacgtcctggccagcctggccaagaaggcggaaaaggagggctacgaggtccgcatcctcaccgccgacaaagacctttaccagctcctttccgaccgcatccacgccctccaccccgaggggtacctcatcaccccggcctggctttgggaaaagtacggcctgaggcccgaccagtgggccgactaccgggccctgaccggggacgagtccgacaaccttcccggggtcaagggcatcggggagaagacggcgaggaagcttctggaggagtgggggagcctggaagccctcctcaagaacctggaccggctgaagcccgccatccgggagaagatcctggcccacatggacgatctgaagctctcctgggacctggccaaggtgcgcaccgacctgcccctggaggtggacttcgccaaaaggcgggagcccgaccgggagaggcttagggcctttctggagaggcttgagtttggcagcctcctccacgagttcggccttctggaaagccccaaggccctggaggaggccccctggcccccgccggaaggggccttcgtgggctttgtgctttcccgcaaggagcccatgtgggccgatcttctggccctggccgccgccagggggggccgggtccaccgggcccccgagccttataaagccctcagggacctgaaggaggcgcgggggcttctcgccaaagacctgagcgttctggccctgagggaaggccttggcctcccgcccggcgacgaccccatgctcctcgcctacctcctggacccttccaacaccacccccgagggggtggcccggcgctacggcggggagtggacggaggaggcgggggagcgggccgccctttccgagaggctcttcgccaacctgtgggggaggcttgagggggaggagaggctcctttggctttaccgggaggtggagaggcccctttccgctgtcctggcccacatggaggccacgggggtgcgcctggacgtggcctatctcagggccttgtccctggaggtggccgaggagatcgcccgcctcgaggccgaggtcttccgcctggccggccaccccttcaacctcaactcccgggaccagctggaaagggtcctctttgacgagctagggcttcccgccatcggcaagacggagaagaccggcaagcgctccaccagcgccgccgtcctggaggccctccgcgaggcccaccccatcgtggagaagatcctgcagtaccgggagctcaccaagctgaagagcacctacattgaccccttgccggacctcatccaccccaggacgggccgcctccacacccgcttcaaccagacggccacggccacgggcaggctaagtagctccgatcccaacctccagaacatccccgtccgcaccccgcttgggcagaggatccgccgggccttcatcgccgaggaggggtggctattggtggccctggactatagccagatagagctcagggtgctggcccacctctccggcgacgagaacctgatccgggtcttccaggaggggcgggacatccacacggagaccgccagctggatgttcggcgtcccccgggaggccgtggaccccctgatgcgccgggcggccaagaccatcaacttcggggtcctctacggcatgtcggcccaccgcctctcccaggagctagccatcccttacgaggaggcccaggccttcattgagcgctactttcagagcttccccaaggtgcgggcctggattgagaagaccctggaggagggcaggaggcgggggtacgtggagaccctcttcggccgccgccgctacgtgccagacctagaggcccgggtgattagcgtgcgggaggcggccgagcgcatggccttcaacatgcccgtccagggcaccgccgccgacctcatgaagctggctatggtgaagctcttccccaggctggaggaaatgggggccaggatgctccttcaggtccacgacgagctggtcctcgaggccccaaaagagagggcggaggccgtggcccggctggccaaggaggtcatggagggggtgtatcccctggccgtgcccctggaggtggaggtggggataggggaggactggctctccgccaaggagtgataccaccccatgctggcccaagccagcatgggggccccggcaaaaggtttctggggaagttaccaggcatggtgggccgaaggaaacaggaaacaagggtatgagggttttttgccctaaagaaaggccagggggtcctcccgaaggaaggcttccagggggataccccctgggcccaggagtagcccctttcctccaaaggcctgggtgaaggcttttagccctttggtcctttgggaaggggcgcttttgacctccaaagccagaaggcgccttcccttcttcaagacgaagtcaacctcctggtccctttcccgccagtagtacacctcaaagcccccgtgggggccgtgggccagaaggtgggcgcccacggcggtttccacgagccgccccatgagggcggcgtccgcccacacctcctttggggaaagccccaagaccgccgtgatgagccccgtattaagggccaggagcttggggctcgaggcgcggcgccggaagggctcggcggcgtacttctgcag

SEQ ID NO: 3438 - DNA, 3026 bp, Artificial Sequence
  Description of Artificial Sequence: Synthetic DNA sequence of Thermus aquaticus DNA Polymerase K738L
atgagggggatgctgcccctctttgagcccaagggccgggtcctcctggtggacggccaccacctggcctaccgcaccttccacgccctgaagggcctcaccaccagccggggggagccggtgcaggcggtctacggcttcgccaagagcctcctcaaggccctcaaggaggacggggacgcggtgatcgtggtctttgacgccaaggccccctccttccgccacgaggcctacggggggtacaaggcgggccgggcccccacgccggaggactttccccggcaactcgccctcatcaaggagctggtggacctcctggggctggcgcgcctcgaggtcccgggctacgaggcggacgacgtcctggccagcctggccaagaaggcggaaaaggagggctacgaggtccgcatcctcaccgccgacaaagacctttaccagctcctttccgaccgcatccacgccctccaccccgaggggtacctcatcaccccggcctggctttgggaaaagtacggcctgaggcccgaccagtgggccgactaccgggccctgaccggggacgagtccgacaaccttcccggggtcaagggcatcggggagaagacggcgaggaagcttctggaggagtgggggagcctggaagccctcctcaagaacctggaccggctgaagcccgccatccgggagaagatcctggcccacatggacgatctgaagctctcctgggacctggccaaggtgcgcaccgacctgcccctggaggtggacttcgccaaaaggcgggagcccgaccgggagaggcttagggcctttctggagaggcttgagtttggcagcctcctccacgagttcggccttctggaaagccccaaggccctggaggaggccccctggcccccgccggaaggggccttcgtgggctttgtgctttcccgcaaggagcccatgtgggccgatcttctggccctggccgccgccagggggggccgggtccaccgggcccccgagccttataaagccctcagggacctgaaggaggcgcgggggcttctcgccaaagacctgagcgttctggccctgagggaaggccttggcctcccgcccggcgacgaccccatgctcctcgcctacctcctggacccttccaacaccacccccgagggggtggcccggcgctacggcggggagtggacggaggaggcgggggagcgggccgccctttccgagaggctcttcgccaacctgtgggggaggcttgagggggaggagaggctcctttggctttaccgggaggtggagaggcccctttccgctgtcctggcccacatggaggccacgggggtgcgcctggacgtggcctatctcagggccttgtccctggaggtggccgaggagatcgcccgcctcgaggccgaggtcttccgcctggccggccaccccttcaacctcaactcccgggaccagctggaaagggtcctctttgacgagctagggcttcccgccatcggcaagacggagaagaccggcaagcgctccaccagcgccgccgtcctggaggccctccgcgaggcccaccccatcgtggagaagatcctgcagtaccgggagctcaccaagctgaagagcacctacattgaccccttgccggacctcatccaccccaggacgggccgcctccacacccgcttcaaccagacggccacggccacgggcaggctaagtagctccgatcccaacctccagaacatccccgtccgcaccccgcttgggcagaggatccgccgggccttcatcgccgaggaggggtggctattggtggccctggactatagccagatagagctcagggtgctggcccacctctccggcgacgagaacctgatccgggtcttccaggaggggcgggacatccacacggagaccgccagctggatgttcggcgtcccccgggaggccgtggaccccctgatgcgccgggcggccaagaccatcaacttcggggtcctctacggcatgtcggcccaccgcctctcccaggagctagccatcccttacgaggaggcccaggccttcattgagcgctactttcagagcttccccaaggtgcgggcctggattgagaagaccctggaggagggcaggaggcgggggtacgtggagaccctcttcggccgccgccgctacgtgccagacctagaggcccgggtgttaagcgtgcgggaggcggccgagcgcatggccttcaacatgcccgtccagggcaccgccgccgacctcatgaagctggctatggtgaagctcttccccaggctggaggaaatgggggccaggatgctccttcaggtccacgacgagctggtcctcgaggccccaaaagagagggcggaggccgtggcccggctggccaaggaggtcatggagggggtgtatcccctggccgtgcccctggaggtggaggtggggataggggaggactggctctccgccaaggagtgataccaccccatgctggcccaagccagcatgggggccccggcaaaaggtttctggggaagttaccaggcatggtgggccgaaggaaacaggaaacaagggtatgagggttttttgccctaaagaaaggccagggggtcctcccgaaggaaggcttccagggggataccccctgggcccaggagtagcccctttcctccaaaggcctgggtgaaggcttttagccctttggtcctttgggaaggggcgcttttgacctccaaagccagaaggcgccttcccttcttcaagacgaagtcaacctcctggtccctttcccgccagtagtacacctcaaagcccccgtgggggccgtgggccagaaggtgggcgcccacggcggtttccacgagccgccccatgagggcggcgtccgcccacacctcctttggggaaagccccaagaccgccgtgatgagccccgtattaagggccaggagcttggggctcgaggcgcggcgccggaagggctcggcggcgtacttctgcag

SEQ ID NO: 3439 - DNA, 3026 bp, Artificial Sequence
  Description of Artificial Sequence: Synthetic DNA sequence of Thermus aquaticus DNA Polymerase K738E
atgagggggatgctgcccctctttgagcccaagggccgggtcctcctggtggacggccaccacctggcctaccgcaccttccacgccctgaagggcctcaccaccagccggggggagccggtgcaggcggtctacggcttcgccaagagcctcctcaaggccctcaaggaggacggggacgcggtgatcgtggtctttgacgccaaggccccctccttccgccacgaggcctacggggggtacaaggcgggccgggcccccacgccggaggactttccccggcaactcgccctcatcaaggagctggtggacctcctggggctggcgcgcctcgaggtcccgggctacgaggcggacgacgtcctggccagcctggccaagaaggcggaaaaggagggctacgaggtccgcatcctcaccgccgacaaagacctttaccagctcctttccgaccgcatccacgccctccaccccgaggggtacctcatcaccccggcctggctttgggaaaagtacggcctgaggcccgaccagtgggccgactaccgggccctgaccggggacgagtccgacaaccttcccggggtcaagggcatcggggagaagacggcgaggaagcttctggaggagtgggggagcctggaagccctcctcaagaacctggaccggctgaagcccgccatccgggagaagatcctggcccacatggacgatctgaagctctcctgggacctggccaaggtgcgcaccgacctgcccctggaggtggacttcgccaaaaggcgggagcccgaccgggagaggcttagggcctttctggagaggcttgagtttggcagcctcctccacgagttcggccttctggaaagccccaaggccctggaggaggccccctggcccccgccggaaggggccttcgtgggctttgtgctttcccgcaaggagcccatgtgggccgatcttctggccctggccgccgccagggggggccgggtccaccgggcccccgagccttataaagccctcagggacctgaaggaggcgcgggggcttctcgccaaagacctgagcgttctggccctgagggaaggccttggcctcccgcccggcgacgaccccatgctcctcgcctacctcctggacccttccaacaccacccccgagggggtggcccggcgctacggcggggagtggacggaggaggcgggggagcgggccgccctttccgagaggctcttcgccaacctgtgggggaggcttgagggggaggagaggctcctttggctttaccgggaggtggagaggcccctttccgctgtcctggcccacatggaggccacgggggtgcgcctggacgtggcctatctcagggccttgtccctggaggtggccgaggagatcgcccgcctcgaggccgaggtcttccgcctggccggccaccccttcaacctcaactcccgggaccagctggaaagggtcctctttgacgagctagggcttcccgccatcggcaagacggagaagaccggcaagcgctccaccagcgccgccgtcctggaggccctccgcgaggcccaccccatcgtggagaagatcctgcagtaccgggagctcaccaagctgaagagcacctacattgaccccttgccggacctcatccaccccaggacgggccgcctccacacccgcttcaaccagacggccacggccacgggcaggctaagtagctccgatcccaacctccagaacatccccgtccgcaccccgcttgggcagaggatccgccgggccttcatcgccgaggaggggtggctattggtggccctggactatagccagatagagctcagggtgctggcccacctctccggcgacgagaacctgatccgggtcttccaggaggggcgggacatccacacggagaccgccagctggatgttcggcgtcccccgggaggccgtggaccccctgatgcgccgggcggccaagaccatcaacttcggggtcctctacggcatgtcggcccaccgcctctcccaggagctagccatcccttacgaggaggcccaggccttcattgagcgctactttcagagcttccccaaggtgcgggcctggattgagaagaccctggaggagggcaggaggcgggggtacgtggagaccctcttcggccgccgccgctacgtgccagacctagaggcccgggtggaaagcgtgcgggaggcggccgagcgcatggccttcaacatgcccgtccagggcaccgccgccgacctcatgaagctggctatggtgaagctcttccccaggctggaggaaatgggggccaggatgctccttcaggtccacgacgagctggtcctcgaggccccaaaagagagggcggaggccgtggcccggctggccaaggaggtcatggagggggtgtatcccctggccgtgcccctggaggtggaggtggggataggggaggactggctctccgccaaggagtgataccaccccatgctggcccaagccagcatgggggccccggcaaaaggtttctggggaagttaccaggcatggtgggccgaaggaaacaggaaacaagggtatgagggttttttgccctaaagaaaggccagggggtcctcccgaaggaaggcttccagggggataccccctgggcccaggagtagcccctttcctccaaaggcctgggtgaaggcttttagccctttggtcctttgggaaggggcgcttttgacctccaaagccagaaggcgccttcccttcttcaagacgaagtcaacctcctggtccctttcccgccagtagtacacctcaaagcccccgtgggggccgtgggccagaaggtgggcgcccacggcggtttccacgagccgccccatgagggcggcgtccgcccacacctcctttggggaaagccccaagaccgccgtgatgagccccgtattaagggccaggagcttggggctcgaggcgcggcgccggaagggctcggcggcgtacttctgcag

SEQ ID NO: 3440 - DNA, 3026 bp, Artificial Sequence
  Description of Artificial Sequence: Synthetic DNA sequence of Thermus aquaticus DNA Polymerase K738D
atgagggggatgctgcccctctttgagcccaagggccgggtcctcctggtggacggccaccacctggcctaccgcaccttccacgccctgaagggcctcaccaccagccggggggagccggtgcaggcggtctacggcttcgccaagagcctcctcaaggccctcaaggaggacggggacgcggtgatcgtggtctttgacgccaaggccccctccttccgccacgaggcctacggggggtacaaggcgggccgggcccccacgccggaggactttccccggcaactcgccctcatcaaggagctggtggacctcctggggctggcgcgcctcgaggtcccgggctacgaggcggacgacgtcctggccagcctggccaagaaggcggaaaaggagggctacgaggtccgcatcctcaccgccgacaaagacctttaccagctcctttccgaccgcatccacgccctccaccccgaggggtacctcatcaccccggcctggctttgggaaaagtacggcctgaggcccgaccagtgggccgactaccgggccctgaccggggacgagtccgacaaccttcccggggtcaagggcatcggggagaagacggcgaggaagcttctggaggagtgggggagcctggaagccctcctcaagaacctggaccggctgaagcccgccatccgggagaagatcctggcccacatggacgatctgaagctctcctgggacctggccaaggtgcgcaccgacctgcccctggaggtggacttcgccaaaaggcgggagcccgaccgggagaggcttagggcctttctggagaggcttgagtttggcagcctcctccacgagttcggccttctggaaagccccaaggccctggaggaggccccctggcccccgccggaaggggccttcgtgggctttgtgctttcccgcaaggagcccatgtgggccgatcttctggccctggccgccgccagggggggccgggtccaccgggcccccgagccttataaagccctcagggacctgaaggaggcgcgggggcttctcgccaaagacctgagcgttctggccctgagggaaggccttggcctcccgcccggcgacgaccccatgctcctcgcctacctcctggacccttccaacaccacccccgagggggtggcccggcgctacggcggggagtggacggaggaggcgggggagcgggccgccctttccgagaggctcttcgccaacctgtgggggaggcttgagggggaggagaggctcctttggctttaccgggaggtggagaggcccctttccgctgtcctggcccacatggaggccacgggggtgcgcctggacgtggcctatctcagggccttgtccctggaggtggccgaggagatcgcccgcctcgaggccgaggtcttccgcctggccggccaccccttcaacctcaactcccgggaccagctggaaagggtcctctttgacgagctagggcttcccgccatcggcaagacggagaagaccggcaagcgctccaccagcgccgccgtcctggaggccctccgcgaggcccaccccatcgtggagaagatcctgcagtaccgggagctcaccaagctgaagagcacctacattgaccccttgccggacctcatccaccccaggacgggccgcctccacacccgcttcaaccagacggccacggccacgggcaggctaagtagctccgatcccaacctccagaacatccccgtccgcaccccgcttgggcagaggatccgccgggccttcatcgccgaggaggggtggctattggtggccctggactatagccagatagagctcagggtgctggcccacctctccggcgacgagaacctgatccgggtcttccaggaggggcgggacatccacacggagaccgccagctggatgttcggcgtcccccgggaggccgtggaccccctgatgcgccgggcggccaagaccatcaacttcggggtcctctacggcatgtcggcccaccgcctctcccaggagctagccatcccttacgaggaggcccaggccttcattgagcgctactttcagagcttccccaaggtgcgggcctggattgagaagaccctggaggagggcaggaggcgggggtacgtggagaccctcttcggccgccgccgctacgtgccagacctagaggcccgggtggatagcgtgcgggaggcggccgagcgcatggccttcaacatgcccgtccagggcaccgccgccgacctcatgaagctggctatggtgaagctcttccccaggctggaggaaatgggggccaggatgctccttcaggtccacgacgagctggtcctcgaggccccaaaagagagggcggaggccgtggcccggctggccaaggaggtcatggagggggtgtatcccctggccgtgcccctggaggtggaggtggggataggggaggactggctctccgccaaggagtgataccaccccatgctggcccaagccagcatgggggccccggcaaaaggtttctggggaagttaccaggcatggtgggccgaaggaaacaggaaacaagggtatgagggttttttgccctaaagaaaggccagggggtcctcccgaaggaaggcttccagggggataccccctgggcccaggagtagcccctttcctccaaaggcctgggtgaaggcttttagccctttggtcctttgggaaggggcgcttttgacctccaaagccagaaggcgccttcccttcttcaagacgaagtcaacctcctggtccctttcccgccagtagtacacctcaaagcccccgtgggggccgtgggccagaaggtgggcgcccacggcggtttccacgagccgccccatgagggcggcgtccgcccacacctcctttggggaaagccccaagaccgccgtgatgagccccgtattaagggccaggagcttggggctcgaggcgcggcgccggaagggctcggcggcgtacttctgcag

SEQ ID NO: 3441 - DNA, 3026 bp, Artificial Sequence
  Description of Artificial Sequence: Synthetic DNA sequence of Thermus aquaticus DNA Polymerase K738F
atgagggggatgctgcccctctttgagcccaagggccgggtcctcctggtggacggccaccacctggcctaccgcaccttccacgccctgaagggcctcaccaccagccggggggagccggtgcaggcggtctacggcttcgccaagagcctcctcaaggccctcaaggaggacggggacgcggtgatcgtggtctttgacgccaaggccccctccttccgccacgaggcctacggggggtacaaggcgggccgggcccccacgccggaggactttccccggcaactcgccctcatcaaggagctggtggacctcctggggctggcgcgcctcgaggtcccgggctacgaggcggacgacgtcctggccagcctggccaagaaggcggaaaaggagggctacgaggtccgcatcctcaccgccgacaaagacctttaccagctcctttccgaccgcatccacgccctccaccccgaggggtacctcatcaccccggcctggctttgggaaaagtacggcctgaggcccgaccagtgggccgactaccgggccctgaccggggacgagtccgacaaccttcccggggtcaagggcatcggggagaagacggcgaggaagcttctggaggagtgggggagcctggaagccctcctcaagaacctggaccggctgaagcccgccatccgggagaagatcctggcccacatggacgatctgaagctctcctgggacctggccaaggtgcgcaccgacctgcccctggaggtggacttcgccaaaaggcgggagcccgaccgggagaggcttagggcctttctggagaggcttgagtttggcagcctcctccacgagttcggccttctggaaagccccaaggccctggaggaggccccctggcccccgccggaaggggccttcgtgggctttgtgctttcccgcaaggagcccatgtgggccgatcttctggccctggccgccgccagggggggccgggtccaccgggcccccgagccttataaagccctcagggacctgaaggaggcgcgggggcttctcgccaaagacctgagcgttctggccctgagggaaggccttggcctcccgcccggcgacgaccccatgctcctcgcctacctcctggacccttccaacaccacccccgagggggtggcccggcgctacggcggggagtggacggaggaggcgggggagcgggccgccctttccgagaggctcttcgccaacctgtgggggaggcttgagggggaggagaggctcctttggctttaccgggaggtggagaggcccctttccgctgtcctggcccacatggaggccacgggggtgcgcctggacgtggcctatctcagggccttgtccctggaggtggccgaggagatcgcccgcctcgaggccgaggtcttccgcctggccggccaccccttcaacctcaactcccgggaccagctggaaagggtcctctttgacgagctagggcttcccgccatcggcaagacggagaagaccggcaagcgctccaccagcgccgccgtcctggaggccctccgcgaggcccaccccatcgtggagaagatcctgcagtaccgggagctcaccaagctgaagagcacctacattgaccccttgccggacctcatccaccccaggacgggccgcctccacacccgcttcaaccagacggccacggccacgggcaggctaagtagctccgatcccaacctccagaacatccccgtccgcaccccgcttgggcagaggatccgccgggccttcatcgccgaggaggggtggctattggtggccctggactatagccagatagagctcagggtgctggcccacctctccggcgacgagaacctgatccgggtcttccaggaggggcgggacatccacacggagaccgccagctggatgttcggcgtcccccgggaggccgtggaccccctgatgcgccgggcggccaagaccatcaacttcggggtcctctacggcatgtcggcccaccgcctctcccaggagctagccatcccttacgaggaggcccaggccttcattgagcgctactttcagagcttccccaaggtgcgggcctggattgagaagaccctggaggagggcaggaggcgggggtacgtggagaccctcttcggccgccgccgctacgtgccagacctagaggcccgggtgtttagcgtgcgggaggcggccgagcgcatggccttcaacatgcccgtccagggcaccgccgccgacctcatgaagctggctatggtgaagctcttccccaggctggaggaaatgggggccaggatgctccttcaggtccacgacgagctggtcctcgaggccccaaaagagagggcggaggccgtggcccggctggccaaggaggtcatggagggggtgtatcccctggccgtgcccctggaggtggaggtggggataggggaggactggctctccgccaaggagtgataccaccccatgctggcccaagccagcatgggggccccggcaaaaggtttctggggaagttaccaggcatggtgggccgaaggaaacaggaaacaagggtatgagggttttttgccctaaagaaaggccagggggtcctcccgaaggaaggcttccagggggataccccctgggcccaggagtagcccctttcctccaaaggcctgggtgaaggcttttagccctttggtcctttgggaaggggcgcttttgacctccaaagccagaaggcgccttcccttcttcaagacgaagtcaacctcctggtccctttcccgccagtagtacacctcaaagcccccgtgggggccgtgggccagaaggtgggcgcccacggcggtttccacgagccgccccatgagggcggcgtccgcccacacctcctttggggaaagccccaagaccgccgtgatgagccccgtattaagggccaggagcttggggctcgaggcgcggcgccggaagggctcggcggcgtacttctgcag

SEQ ID NO: 3442 - DNA, 3026 bp, Artificial Sequence
  Description of Artificial Sequence: Synthetic DNA sequence of Thermus aquaticus DNA Polymerase K738S
atgagggggatgctgcccctctttgagcccaagggccgggtcctcctggtggacggccaccacctggcctaccgcaccttccacgccctgaagggcctcaccaccagccggggggagccggtgcaggcggtctacggcttcgccaagagcctcctcaaggccctcaaggaggacggggacgcggtgatcgtggtctttgacgccaaggccccctccttccgccacgaggcctacggggggtacaaggcgggccgggcccccacgccggaggactttccccggcaactcgccctcatcaaggagctggtggacctcctggggctggcgcgcctcgaggtcccgggctacgaggcggacgacgtcctggccagcctggccaagaaggcggaaaaggagggctacgaggtccgcatcctcaccgccgacaaagacctttaccagctcctttccgaccgcatccacgccctccaccccgaggggtacctcatcaccccggcctggctttgggaaaagtacggcctgaggcccgaccagtgggccgactaccgggccctgaccggggacgagtccgacaaccttcccggggtcaagggcatcggggagaagacggcgaggaagcttctggaggagtgggggagcctggaagccctcctcaagaacctggaccggctgaagcccgccatccgggagaagatcctggcccacatggacgatctgaagctctcctgggacctggccaaggtgcgcaccgacctgcccctggaggtggacttcgccaaaaggcgggagcccgaccgggagaggcttagggcctttctggagaggcttgagtttggcagcctcctccacgagttcggccttctggaaagccccaaggccctggaggaggccccctggcccccgccggaaggggccttcgtgggctttgtgctttcccgcaaggagcccatgtgggccgatcttctggccctggccgccgccagggggggccgggtccaccgggcccccgagccttataaagccctcagggacctgaaggaggcgcgggggcttctcgccaaagacctgagcgttctggccctgagggaaggccttggcctcccgcccggcgacgaccccatgctcctcgcctacctcctggacccttccaacaccacccccgagggggtggcccggcgctacggcggggagtggacggaggaggcgggggagcgggccgccctttccgagaggctcttcgccaacctgtgggggaggcttgagggggaggagaggctcctttggctttaccgggaggtggagaggcccctttccgctgtcctggcccacatggaggccacgggggtgcgcctggacgtggcctatctcagggccttgtccctggaggtggccgaggagatcgcccgcctcgaggccgaggtcttccgcctggccggccaccccttcaacctcaactcccgggaccagctggaaagggtcctctttgacgagctagggcttcccgccatcggcaagacggagaagaccggcaagcgctccaccagcgccgccgtcctggaggccctccgcgaggcccaccccatcgtggagaagatcctgcagtaccgggagctcaccaagctgaagagcacctacattgaccccttgccggacctcatccaccccaggacgggccgcctccacacccgcttcaaccagacggccacggccacgggcaggctaagtagctccgatcccaacctccagaacatccccgtccgcaccccgcttgggcagaggatccgccgggccttcatcgccgaggaggggtggctattggtggccctggactatagccagatagagctcagggtgctggcccacctctccggcgacgagaacctgatccgggtcttccaggaggggcgggacatccacacggagaccgccagctggatgttcggcgtcccccgggaggccgtggaccccctgatgcgccgggcggccaagaccatcaacttcggggtcctctacggcatgtcggcccaccgcctctcccaggagctagccatcccttacgaggaggcccaggccttcattgagcgctactttcagagcttccccaaggtgcgggcctggattgagaagaccctggaggagggcaggaggcgggggtacgtggagaccctcttcggccgccgccgctacgtgccagacctagaggcccgggtgtctagcgtgcgggaggcggccgagcgcatggccttcaacatgcccgtccagggcaccgccgccgacctcatgaagctggctatggtgaagctcttccccaggctggaggaaatgggggccaggatgctccttcaggtccacgacgagctggtcctcgaggccccaaaagagagggcggaggccgtggcccggctggccaaggaggtcatggagggggtgtatcccctggccgtgcccctggaggtggaggtggggataggggaggactggctctccgccaaggagtgataccaccccatgctggcccaagccagcatgggggccccggcaaaaggtttctggggaagttaccaggcatggtgggccgaaggaaacaggaaacaagggtatgagggttttttgccctaaagaaaggccagggggtcctcccgaaggaaggcttccagggggataccccctgggcccaggagtagcccctttcctccaaaggcctgggtgaaggcttttagccctttggtcctttgggaaggggcgcttttgacctccaaagccagaaggcgccttcccttcttcaagacgaagtcaacctcctggtccctttcccgccagtagtacacctcaaagcccccgtgggggccgtgggccagaaggtgggcgcccacggcggtttccacgagccgccccatgagggcggcgtccgcccacacctcctttggggaaagccccaagaccgccgtgatgagccccgtattaagggccaggagcttggggctcgaggcgcggcgccggaagggctcggcggcgtacttctgcag

SEQ ID NO: 3443 - DNA, 3026 bp, Artificial Sequence
  Description of Artificial Sequence: Synthetic DNA sequence of Thermus aquaticus DNA Polymerase K738Y
atgagggggatgctgcccctctttgagcccaagggccgggtcctcctggtggacggccaccacctggcctaccgcaccttccacgccctgaagggcctcaccaccagccggggggagccggtgcaggcggtctacggcttcgccaagagcctcctcaaggccctcaaggaggacggggacgcggtgatcgtggtctttgacgccaaggccccctccttccgccacgaggcctacggggggtacaaggcgggccgggcccccacgccggaggactttccccggcaactcgccctcatcaaggagctggtggacctcctggggctggcgcgcctcgaggtcccgggctacgaggcggacgacgtcctggccagcctggccaagaaggcggaaaaggagggctacgaggtccgcatcctcaccgccgacaaagacctttaccagctcctttccgaccgcatccacgccctccaccccgaggggtacctcatcaccccggcctggctttgggaaaagtacggcctgaggcccgaccagtgggccgactaccgggccctgaccggggacgagtccgacaaccttcccggggtcaagggcatcggggagaagacggcgaggaagcttctggaggagtgggggagcctggaagccctcctcaagaacctggaccggctgaagcccgccatccgggagaagatcctggcccacatggacgatctgaagctctcctgggacctggccaaggtgcgcaccgacctgcccctggaggtggacttcgccaaaaggcgggagcccgaccgggagaggcttagggcctttctggagaggcttgagtttggcagcctcctccacgagttcggccttctggaaagccccaaggccctggaggaggccccctggcccccgccggaaggggccttcgtgggctttgtgctttcccgcaaggagcccatgtgggccgatcttctggccctggccgccgccagggggggccgggtccaccgggcccccgagccttataaagccctcagggacctgaaggaggcgcgggggcttctcgccaaagacctgagcgttctggccctgagggaaggccttggcctcccgcccggcgacgaccccatgctcctcgcctacctcctggacccttccaacaccacccccgagggggtggcccggcgctacggcggggagtggacggaggaggcgggggagcgggccgccctttccgagaggctcttcgccaacctgtgggggaggcttgagggggaggagaggctcctttggctttaccgggaggtggagaggcccctttccgctgtcctggcccacatggaggccacgggggtgcgcctggacgtggcctatctcagggccttgtccctggaggtggccgaggagatcgcccgcctcgaggccgaggtcttccgcctggccggccaccccttcaacctcaactcccgggaccagctggaaagggtcctctttgacgagctagggcttcccgccatcggcaagacggagaagaccggcaagcgctccaccagcgccgccgtcctggaggccctccgcgaggcccaccccatcgtggagaagatcctgcagtaccgggagctcaccaagctgaagagcacctacattgaccccttgccggacctcatccaccccaggacgggccgcctccacacccgcttcaaccagacggccacggccacgggcaggctaagtagctccgatcccaacctccagaacatccccgtccgcaccccgcttgggcagaggatccgccgggccttcatcgccgaggaggggtggctattggtggccctggactatagccagatagagctcagggtgctggcccacctctccggcgacgagaacctgatccgggtcttccaggaggggcgggacatccacacggagaccgccagctggatgttcggcgtcccccgggaggccgtggaccccctgatgcgccgggcggccaagaccatcaacttcggggtcctctacggcatgtcggcccaccgcctctcccaggagctagccatcccttacgaggaggcccaggccttcattgagcgctactttcagagcttccccaaggtgcgggcctggattgagaagaccctggaggagggcaggaggcgggggtacgtggagaccctcttcggccgccgccgctacgtgccagacctagaggcccgggtgtatagcgtgcgggaggcggccgagcgcatggccttcaacatgcccgtccagggcaccgccgccgacctcatgaagctggctatggtgaagctcttccccaggctggaggaaatgggggccaggatgctccttcaggtccacgacgagctggtcctcgaggccccaaaagagagggcggaggccgtggcccggctggccaaggaggtcatggagggggtgtatcccctggccgtgcccctggaggtggaggtggggataggggaggactggctctccgccaaggagtgataccaccccatgctggcccaagccagcatgggggccccggcaaaaggtttctggggaagttaccaggcatggtgggccgaaggaaacaggaaacaagggtatgagggttttttgccctaaagaaaggccagggggtcctcccgaaggaaggcttccagggggataccccctgggcccaggagtagcccctttcctccaaaggcctgggtgaaggcttttagccctttggtcctttgggaaggggcgcttttgacctccaaagccagaaggcgccttcccttcttcaagacgaagtcaacctcctggtccctttcccgccagtagtacacctcaaagcccccgtgggggccgtgggccagaaggtgggcgcccacggcggtttccacgagccgccccatgagggcggcgtccgcccacacctcctttggggaaagccccaagaccgccgtgatgagccccgtattaagggccaggagcttggggctcgaggcgcggcgccggaagggctcggcggcgtacttctgcag

SEQ ID NO: 3444 - DNA, 3026 bp, Artificial Sequence
  Description of Artificial Sequence: Synthetic DNA sequence of Thermus aquaticus DNA Polymerase K738W
atgagggggatgctgcccctctttgagcccaagggccgggtcctcctggtggacggccaccacctggcctaccgcaccttccacgccctgaagggcctcaccaccagccggggggagccggtgcaggcggtctacggcttcgccaagagcctcctcaaggccctcaaggaggacggggacgcggtgatcgtggtctttgacgccaaggccccctccttccgccacgaggcctacggggggtacaaggcgggccgggcccccacgccggaggactttccccggcaactcgccctcatcaaggagctggtggacctcctggggctggcgcgcctcgaggtcccgggctacgaggcggacgacgtcctggccagcctggccaagaaggcggaaaaggagggctacgaggtccgcatcctcaccgccgacaaagacctttaccagctcctttccgaccgcatccacgccctccaccccgaggggtacctcatcaccccggcctggctttgggaaaagtacggcctgaggcccgaccagtgggccgactaccgggccctgaccggggacgagtccgacaaccttcccggggtcaagggcatcggggagaagacggcgaggaagcttctggaggagtgggggagcctggaagccctcctcaagaacctggaccggctgaagcccgccatccgggagaagatcctggcccacatggacgatctgaagctctcctgggacctggccaaggtgcgcaccgacctgcccctggaggtggacttcgccaaaaggcgggagcccgaccgggagaggcttagggcctttctggagaggcttgagtttggcagcctcctccacgagttcggccttctggaaagccccaaggccctggaggaggccccctggcccccgccggaaggggccttcgtgggctttgtgctttcccgcaaggagcccatgtgggccgatcttctggccctggccgccgccagggggggccgggtccaccgggcccccgagccttataaagccctcagggacctgaaggaggcgcgggggcttctcgccaaagacctgagcgttctggccctgagggaaggccttggcctcccgcccggcgacgaccccatgctcctcgcctacctcctggacccttccaacaccacccccgagggggtggcccggcgctacggcggggagtggacggaggaggcgggggagcgggccgccctttccgagaggctcttcgccaacctgtgggggaggcttgagggggaggagaggctcctttggctttaccgggaggtggagaggcccctttccgctgtcctggcccacatggaggccacgggggtgcgcctggacgtggcctatctcagggccttgtccctggaggtggccgaggagatcgcccgcctcgaggccgaggtcttccgcctggccggccaccccttcaacctcaactcccgggaccagctggaaagggtcctctttgacgagctagggcttcccgccatcggcaagacggagaagaccggcaagcgctccaccagcgccgccgtcctggaggccctccgcgaggcccaccccatcgtggagaagatcctgcagtaccgggagctcaccaagctgaagagcacctacattgaccccttgccggacctcatccaccccaggacgggccgcctccacacccgcttcaaccagacggccacggccacgggcaggctaagtagctccgatcccaacctccagaacatccccgtccgcaccccgcttgggcagaggatccgccgggccttcatcgccgaggaggggtggctattggtggccctggactatagccagatagagctcagggtgctggcccacctctccggcgacgagaacctgatccgggtcttccaggaggggcgggacatccacacggagaccgccagctggatgttcggcgtcccccgggaggccgtggaccccctgatgcgccgggcggccaagaccatcaacttcggggtcctctacggcatgtcggcccaccgcctctcccaggagctagccatcccttacgaggaggcccaggccttcattgagcgctactttcagagcttccccaaggtgcgggcctggattgagaagaccctggaggagggcaggaggcgggggtacgtggagaccctcttcggccgccgccgctacgtgccagacctagaggcccgggtgtggagcgtgcgggaggcggccgagcgcatggccttcaacatgcccgtccagggcaccgccgccgacctcatgaagctggctatggtgaagctcttccccaggctggaggaaatgggggccaggatgctccttcaggtccacgacgagctggtcctcgaggccccaaaagagagggcggaggccgtggcccggctggccaaggaggtcatggagggggtgtatcccctggccgtgcccctggaggtggaggtggggataggggaggactggctctccgccaaggagtgataccaccccatgctggcccaagccagcatgggggccccggcaaaaggtttctggggaagttaccaggcatggtgggccgaaggaaacaggaaacaagggtatgagggttttttgccctaaagaaaggccagggggtcctcccgaaggaaggcttccagggggataccccctgggcccaggagtagcccctttcctccaaaggcctgggtgaaggcttttagccctttggtcctttgggaaggggcgcttttgacctccaaagccagaaggcgccttcccttcttcaagacgaagtcaacctcctggtccctttcccgccagtagtacacctcaaagcccccgtgggggccgtgggccagaaggtgggcgcccacggcggtttccacgagccgccccatgagggcggcgtccgcccacacctcctttggggaaagccccaagaccgccgtgatgagccccgtattaagggccaggagcttggggctcgaggcgcggcgccggaagggctcggcggcgtacttctgcag

SEQ ID NO: 3445 - DNA, 3026 bp, Artificial Sequence
  Description of Artificial Sequence: Synthetic DNA sequence of Thermus aquaticus DNA Polymerase K738P
atgagggggatgctgcccctctttgagcccaagggccgggtcctcctggtggacggccaccacctggcctaccgcaccttccacgccctgaagggcctcaccaccagccggggggagccggtgcaggcggtctacggcttcgccaagagcctcctcaaggccctcaaggaggacggggacgcggtgatcgtggtctttgacgccaaggccccctccttccgccacgaggcctacggggggtacaaggcgggccgggcccccacgccggaggactttccccggcaactcgccctcatcaaggagctggtggacctcctggggctggcgcgcctcgaggtcccgggctacgaggcggacgacgtcctggccagcctggccaagaaggcggaaaaggagggctacgaggtccgcatcctcaccgccgacaaagacctttaccagctcctttccgaccgcatccacgccctccaccccgaggggtacctcatcaccccggcctggctttgggaaaagtacggcctgaggcccgaccagtgggccgactaccgggccctgaccggggacgagtccgacaaccttcccggggtcaagggcatcggggagaagacggcgaggaagcttctggaggagtgggggagcctggaagccctcctcaagaacctggaccggctgaagcccgccatccgggagaagatcctggcccacatggacgatctgaagctctcctgggacctggccaaggtgcgcaccgacctgcccctggaggtggacttcgccaaaaggcgggagcccgaccgggagaggcttagggcctttctggagaggcttgagtttggcagcctcctccacgagttcggccttctggaaagccccaaggccctggaggaggccccctggcccccgccggaaggggccttcgtgggctttgtgctttcccgcaaggagcccatgtgggccgatcttctggccctggccgccgccagggggggccgggtccaccgggcccccgagccttataaagccctcagggacctgaaggaggcgcgggggcttctcgccaaagacctgagcgttctggccctgagggaaggccttggcctcccgcccggcgacgaccccatgctcctcgcctacctcctggacccttccaacaccacccccgagggggtggcccggcgctacggcggggagtggacggaggaggcgggggagcgggccgccctttccgagaggctcttcgccaacctgtgggggaggcttgagggggaggagaggctcctttggctttaccgggaggtggagaggcccctttccgctgtcctggcccacatggaggccacgggggtgcgcctggacgtggcctatctcagggccttgtccctggaggtggccgaggagatcgcccgcctcgaggccgaggtcttccgcctggccggccaccccttcaacctcaactcccgggaccagctggaaagggtcctctttgacgagctagggcttcccgccatcggcaagacggagaagaccggcaagcgctccaccagcgccgccgtcctggaggccctccgcgaggcccaccccatcgtggagaagatcctgcagtaccgggagctcaccaagctgaagagcacctacattgaccccttgccggacctcatccaccccaggacgggccgcctccacacccgcttcaaccagacggccacggccacgggcaggctaagtagctccgatcccaacctccagaacatccccgtccgcaccccgcttgggcagaggatccgccgggccttcatcgccgaggaggggtggctattggtggccctggactatagccagatagagctcagggtgctggcccacctctccggcgacgagaacctgatccgggtcttccaggaggggcgggacatccacacggagaccgccagctggatgttcggcgtcccccgggaggccgtggaccccctgatgcgccgggcggccaagaccatcaacttcggggtcctctacggcatgtcggcccaccgcctctcccaggagctagccatcccttacgaggaggcccaggccttcattgagcgctactttcagagcttccccaaggtgcgggcctggattgagaagaccctggaggagggcaggaggcgggggtacgtggagaccctcttcggccgccgccgctacgtgccagacctagaggcccgggtgcctagcgtgcgggaggcggccgagcgcatggccttcaacatgcccgtccagggcaccgccgccgacctcatgaagctggctatggtgaagctcttccccaggctggaggaaatgggggccaggatgctccttcaggtccacgacgagctggtcctcgaggccccaaaagagagggcggaggccgtggcccggctggccaaggaggtcatggagggggtgtatcccctggccgtgcccctggaggtggaggtggggataggggaggactggctctccgccaaggagtgataccaccccatgctggcccaagccagcatgggggccccggcaaaaggtttctggggaagttaccaggcatggtgggccgaaggaaacaggaaacaagggtatgagggttttttgccctaaagaaaggccagggggtcctcccgaaggaaggcttccagggggataccccctgggcccaggagtagcccctttcctccaaaggcctgggtgaaggcttttagccctttggtcctttgggaaggggcgcttttgacctccaaagccagaaggcgccttcccttcttcaagacgaagtcaacctcctggtccctttcccgccagtagtacacctcaaagcccccgtgggggccgtgggccagaaggtgggcgcccacggcggtttccacgagccgccccatgagggcggcgtccgcccacacctcctttggggaaagccccaagaccgccgtgatgagccccgtattaagggccaggagcttggggctcgaggcgcggcgccggaagggctcggcggcgtacttctgcag

SEQ ID NO: 3446 - DNA, 3026 bp, Artificial Sequence
  Description of Artificial Sequence: Synthetic DNA sequence of Thermus aquaticus DNA Polymerase K738M
atgagggggatgctgcccctctttgagcccaagggccgggtcctcctggtggacggccaccacctggcctaccgcaccttccacgccctgaagggcctcaccaccagccggggggagccggtgcaggcggtctacggcttcgccaagagcctcctcaaggccctcaaggaggacggggacgcggtgatcgtggtctttgacgccaaggccccctccttccgccacgaggcctacggggggtacaaggcgggccgggcccccacgccggaggactttccccggcaactcgccctcatcaaggagctggtggacctcctggggctggcgcgcctcgaggtcccgggctacgaggcggacgacgtcctggccagcctggccaagaaggcggaaaaggagggctacgaggtccgcatcctcaccgccgacaaagacctttaccagctcctttccgaccgcatccacgccctccaccccgaggggtacctcatcaccccggcctggctttgggaaaagtacggcctgaggcccgaccagtgggccgactaccgggccctgaccggggacgagtccgacaaccttcccggggtcaagggcatcggggagaagacggcgaggaagcttctggaggagtgggggagcctggaagccctcctcaagaacctggaccggctgaagcccgccatccgggagaagatcctggcccacatggacgatctgaagctctcctgggacctggccaaggtgcgcaccgacctgcccctggaggtggacttcgccaaaaggcgggagcccgaccgggagaggcttagggcctttctggagaggcttgagtttggcagcctcctccacgagttcggccttctggaaagccccaaggccctggaggaggccccctggcccccgccggaaggggccttcgtgggctttgtgctttcccgcaaggagcccatgtgggccgatcttctggccctggccgccgccagggggggccgggtccaccgggcccccgagccttataaagccctcagggacctgaaggaggcgcgggggcttctcgccaaagacctgagcgttctggccctgagggaaggccttggcctcccgcccggcgacgaccccatgctcctcgcctacctcctggacccttccaacaccacccccgagggggtggcccggcgctacggcggggagtggacggaggaggcgggggagcgggccgccctttccgagaggctcttcgccaacctgtgggggaggcttgagggggaggagaggctcctttggctttaccgggaggtggagaggcccctttccgctgtcctggcccacatggaggccacgggggtgcgcctggacgtggcctatctcagggccttgtccctggaggtggccgaggagatcgcccgcctcgaggccgaggtcttccgcctggccggccaccccttcaacctcaactcccgggaccagctggaaagggtcctctttgacgagctagggcttcccgccatcggcaagacggagaagaccggcaagcgctccaccagcgccgccgtcctggaggccctccgcgaggcccaccccatcgtggagaagatcctgcagtaccgggagctcaccaagctgaagagcacctacattgaccccttgccggacctcatccaccccaggacgggccgcctccacacccgcttcaaccagacggccacggccacgggcaggctaagtagctccgatcccaacctccagaacatccccgtccgcaccccgcttgggcagaggatccgccgggccttcatcgccgaggaggggtggctattggtggccctggactatagccagatagagctcagggtgctggcccacctctccggcgacgagaacctgatccgggtcttccaggaggggcgggacatccacacggagaccgccagctggatgttcggcgtcccccgggaggccgtggaccccctgatgcgccgggcggccaagaccatcaacttcggggtcctctacggcatgtcggcccaccgcctctcccaggagctagccatcccttacgaggaggcccaggccttcattgagcgctactttcagagcttccccaaggtgcgggcctggattgagaagaccctggaggagggcaggaggcgggggtacgtggagaccctcttcggccgccgccgctacgtgccagacctagaggcccgggtgatgagcgtgcgggaggcggccgagcgcatggccttcaacatgcccgtccagggcaccgccgccgacctcatgaagctggctatggtgaagctcttccccaggctggaggaaatgggggccaggatgctccttcaggtccacgacgagctggtcctcgaggccccaaaagagagggcggaggccgtggcccggctggccaaggaggtcatggagggggtgtatcccctggccgtgcccctggaggtggaggtggggataggggaggactggctctccgccaaggagtgataccaccccatgctggcccaagccagcatgggggccccggcaaaaggtttctggggaagttaccaggcatggtgggccgaaggaaacaggaaacaagggtatgagggttttttgccctaaagaaaggccagggggtcctcccgaaggaaggcttccagggggataccccctgggcccaggagtagcccctttcctccaaaggcctgggtgaaggcttttagccctttggtcctttgggaaggggcgcttttgacctccaaagccagaaggcgccttcccttcttcaagacgaagtcaacctcctggtccctttcccgccagtagtacacctcaaagcccccgtgggggccgtgggccagaaggtgggcgcccacggcggtttccacgagccgccccatgagggcggcgtccgcccacacctcctttggggaaagccccaagaccgccgtgatgagccccgtattaagggccaggagcttggggctcgaggcgcggcgccggaagggctcggcggcgtacttctgcag

SEQ ID NO: 3447 - DNA, 3026 bp, Artificial Sequence
  Description of Artificial Sequence: Synthetic DNA sequence of Thermus aquaticus DNA Polymerase K738T
atgagggggatgctgcccctctttgagcccaagggccgggtcctcctggtggacggccaccacctggcctaccgcaccttccacgccctgaagggcctcaccaccagccggggggagccggtgcaggcggtctacggcttcgccaagagcctcctcaaggccctcaaggaggacggggacgcggtgatcgtggtctttgacgccaaggccccctccttccgccacgaggcctacggggggtacaaggcgggccgggcccccacgccggaggactttccccggcaactcgccctcatcaaggagctggtggacctcctggggctggcgcgcctcgaggtcccgggctacgaggcggacgacgtcctggccagcctggccaagaaggcggaaaaggagggctacgaggtccgcatcctcaccgccgacaaagacctttaccagctcctttccgaccgcatccacgccctccaccccgaggggtacctcatcaccccggcctggctttgggaaaagtacggcctgaggcccgaccagtgggccgactaccgggccctgaccggggacgagtccgacaaccttcccggggtcaagggcatcggggagaagacggcgaggaagcttctggaggagtgggggagcctggaagccctcctcaagaacctggaccggctgaagcccgccatccgggagaagatcctggcccacatggacgatctgaagctctcctgggacctggccaaggtgcgcaccgacctgcccctggaggtggacttcgccaaaaggcgggagcccgaccgggagaggcttagggcctttctggagaggcttgagtttggcagcctcctccacgagttcggccttctggaaagccccaaggccctggaggaggccccctggcccccgccggaaggggccttcgtgggctttgtgctttcccgcaaggagcccatgtgggccgatcttctggccctggccgccgccagggggggccgggtccaccgggcccccgagccttataaagccctcagggacctgaaggaggcgcgggggcttctcgccaaagacctgagcgttctggccctgagggaaggccttggcctcccgcccggcgacgaccccatgctcctcgcctacctcctggacccttccaacaccacccccgagggggtggcccggcgctacggcggggagtggacggaggaggcgggggagcgggccgccctttccgagaggctcttcgccaacctgtgggggaggcttgagggggaggagaggctcctttggctttaccgggaggtggagaggcccctttccgctgtcctggcccacatggaggccacgggggtgcgcctggacgtggcctatctcagggccttgtccctggaggtggccgaggagatcgcccgcctcgaggccgaggtcttccgcctggccggccaccccttcaacctcaactcccgggaccagctggaaagggtcctctttgacgagctagggcttcccgccatcggcaagacggagaagaccggcaagcgctccaccagcgccgccgtcctggaggccctccgcgaggcccaccccatcgtggagaagatcctgcagtaccgggagctcaccaagctgaagagcacctacattgaccccttgccggacctcatccaccccaggacgggccgcctccacacccgcttcaaccagacggccacggccacgggcaggctaagtagctccgatcccaacctccagaacatccccgtccgcaccccgcttgggcagaggatccgccgggccttcatcgccgaggaggggtggctattggtggccctggactatagccagatagagctcagggtgctggcccacctctccggcgacgagaacctgatccgggtcttccaggaggggcgggacatccacacggagaccgccagctggatgttcggcgtcccccgggaggccgtggaccccctgatgcgccgggcggccaagaccatcaacttcggggtcctctacggcatgtcggcccaccgcctctcccaggagctagccatcccttacgaggaggcccaggccttcattgagcgctactttcagagcttccccaaggtgcgggcctggattgagaagaccctggaggagggcaggaggcgggggtacgtggagaccctcttcggccgccgccgctacgtgccagacctagaggcccgggtgactagcgtgcgggaggcggccgagcgcatggccttcaacatgcccgtccagggcaccgccgccgacctcatgaagctggctatggtgaagctcttccccaggctggaggaaatgggggccaggatgctccttcaggtccacgacgagctggtcctcgaggccccaaaagagagggcggaggccgtggcccggctggccaaggaggtcatggagggggtgtatcccctggccgtgcccctggaggtggaggtggggataggggaggactggctctccgccaaggagtgataccaccccatgctggcccaagccagcatgggggccccggcaaaaggtttctggggaagttaccaggcatggtgggccgaaggaaacaggaaacaagggtatgagggttttttgccctaaagaaaggccagggggtcctcccgaaggaaggcttccagggggataccccctgggcccaggagtagcccctttcctccaaaggcctgggtgaaggcttttagccctttggtcctttgggaaggggcgcttttgacctccaaagccagaaggcgccttcccttcttcaagacgaagtcaacctcctggtccctttcccgccagtagtacacctcaaagcccccgtgggggccgtgggccagaaggtgggcgcccacggcggtttccacgagccgccccatgagggcggcgtccgcccacacctcctttggggaaagccccaagaccgccgtgatgagccccgtattaagggccaggagcttggggctcgaggcgcggcgccggaagggctcggcggcgtacttctgcag

SEQ ID NO: 3448 - DNA, 3026 bp, Artificial Sequence
  Description of Artificial Sequence: Synthetic DNA sequence of Thermus aquaticus DNA Polymerase K738N
atgagggggatgctgcccctctttgagcccaagggccgggtcctcctggtggacggccaccacctggcctaccgcaccttccacgccctgaagggcctcaccaccagccggggggagccggtgcaggcggtctacggcttcgccaagagcctcctcaaggccctcaaggaggacggggacgcggtgatcgtggtctttgacgccaaggccccctccttccgccacgaggcctacggggggtacaaggcgggccgggcccccacgccggaggactttccccggcaactcgccctcatcaaggagctggtggacctcctggggctggcgcgcctcgaggtcccgggctacgaggcggacgacgtcctggccagcctggccaagaaggcggaaaaggagggctacgaggtccgcatcctcaccgccgacaaagacctttaccagctcctttccgaccgcatccacgccctccaccccgaggggtacctcatcaccccggcctggctttgggaaaagtacggcctgaggcccgaccagtgggccgactaccgggccctgaccggggacgagtccgacaaccttcccggggtcaagggcatcggggagaagacggcgaggaagcttctggaggagtgggggagcctggaagccctcctcaagaacctggaccggctgaagcccgccatccgggagaagatcctggcccacatggacgatctgaagctctcctgggacctggccaaggtgcgcaccgacctgcccctggaggtggacttcgccaaaaggcgggagcccgaccgggagaggcttagggcctttctggagaggcttgagtttggcagcctcctccacgagttcggccttctggaaagccccaaggccctggaggaggccccctggcccccgccggaaggggccttcgtgggctttgtgctttcccgcaaggagcccatgtgggccgatcttctggccctggccgccgccagggggggccgggtccaccgggcccccgagccttataaagccctcagggacctgaaggaggcgcgggggcttctcgccaaagacctgagcgttctggccctgagggaaggccttggcctcccgcccggcgacgaccccatgctcctcgcctacctcctggacccttccaacaccacccccgagggggtggcccggcgctacggcggggagtggacggaggaggcgggggagcgggccgccctttccgagaggctcttcgccaacctgtgggggaggcttgagggggaggagaggctcctttggctttaccgggaggtggagaggcccctttccgctgtcctggcccacatggaggccacgggggtgcgcctggacgtggcctatctcagggccttgtccctggaggtggccgaggagatcgcccgcctcgaggccgaggtcttccgcctggccggccaccccttcaacctcaactcccgggaccagctggaaagggtcctctttgacgagctagggcttcccgccatcggcaagacggagaagaccggcaagcgctccaccagcgccgccgtcctggaggccctccgcgaggcccaccccatcgtggagaagatcctgcagtaccgggagctcaccaagctgaagagcacctacattgaccccttgccggacctcatccaccccaggacgggccgcctccacacccgcttcaaccagacggccacggccacgggcaggctaagtagctccgatcccaacctccagaacatccccgtccgcaccccgcttgggcagaggatccgccgggccttcatcgccgaggaggggtggctattggtggccctggactatagccagatagagctcagggtgctggcccacctctccggcgacgagaacctgatccgggtcttccaggaggggcgggacatccacacggagaccgccagctggatgttcggcgtcccccgggaggccgtggaccccctgatgcgccgggcggccaagaccatcaacttcggggtcctctacggcatgtcggcccaccgcctctcccaggagctagccatcccttacgaggaggcccaggccttcattgagcgctactttcagagcttccccaaggtgcgggcctggattgagaagaccctggaggagggcaggaggcgggggtacgtggagaccctcttcggccgccgccgctacgtgccagacctagaggcccgggtgaatagcgtgcgggaggcggccgagcgcatggccttcaacatgcccgtccagggcaccgccgccgacctcatgaagctggctatggtgaagctcttccccaggctggaggaaatgggggccaggatgctccttcaggtccacgacgagctggtcctcgaggccccaaaagagagggcggaggccgtggcccggctggccaaggaggtcatggagggggtgtatcccctggccgtgcccctggaggtggaggtggggataggggaggactggctctccgccaaggagtgataccaccccatgctggcccaagccagcatgggggccccggcaaaaggtttctggggaagttaccaggcatggtgggccgaaggaaacaggaaacaagggtatgagggttttttgccctaaagaaaggccagggggtcctcccgaaggaaggcttccagggggataccccctgggcccaggagtagcccctttcctccaaaggcctgggtgaaggcttttagccctttggtcctttgggaaggggcgcttttgacctccaaagccagaaggcgccttcccttcttcaagacgaagtcaacctcctggtccctttcccgccagtagtacacctcaaagcccccgtgggggccgtgggccagaaggtgggcgcccacggcggtttccacgagccgccccatgagggcggcgtccgcccacacctcctttggggaaagccccaagaccgccgtgatgagccccgtattaagggccaggagcttggggctcgaggcgcggcgccggaagggctcggcggcgtacttctgcag

SEQ ID NO: 3449 - DNA, 3026 bp, Artificial Sequence
  Description of Artificial Sequence: Synthetic DNA sequence of Thermus aquaticus DNA Polymerase K738V
atgagggggatgctgcccctctttgagcccaagggccgggtcctcctggtggacggccaccacctggcctaccgcaccttccacgccctgaagggcctcaccaccagccggggggagccggtgcaggcggtctacggcttcgccaagagcctcctcaaggccctcaaggaggacggggacgcggtgatcgtggtctttgacgccaaggccccctccttccgccacgaggcctacggggggtacaaggcgggccgggcccccacgccggaggactttccccggcaactcgccctcatcaaggagctggtggacctcctggggctggcgcgcctcgaggtcccgggctacgaggcggacgacgtcctggccagcctggccaagaaggcggaaaaggagggctacgaggtccgcatcctcaccgccgacaaagacctttaccagctcctttccgaccgcatccacgccctccaccccgaggggtacctcatcaccccggcctggctttgggaaaagtacggcctgaggcccgaccagtgggccgactaccgggccctgaccggggacgagtccgacaaccttcccggggtcaagggcatcggggagaagacggcgaggaagcttctggaggagtgggggagcctggaagccctcctcaagaacctggaccggctgaagcccgccatccgggagaagatcctggcccacatggacgatctgaagctctcctgggacctggccaaggtgcgcaccgacctgcccctggaggtggacttcgccaaaaggcgggagcccgaccgggagaggcttagggcctttctggagaggcttgagtttggcagcctcctccacgagttcggccttctggaaagccccaaggccctggaggaggccccctggcccccgccggaaggggccttcgtgggctttgtgctttcccgcaaggagcccatgtgggccgatcttctggccctggccgccgccagggggggccgggtccaccgggcccccgagccttataaagccctcagggacctgaaggaggcgcgggggcttctcgccaaagacctgagcgttctggccctgagggaaggccttggcctcccgcccggcgacgaccccatgctcctcgcctacctcctggacccttccaacaccacccccgagggggtggcccggcgctacggcggggagtggacggaggaggcgggggagcgggccgccctttccgagaggctcttcgccaacctgtgggggaggcttgagggggaggagaggctcctttggctttaccgggaggtggagaggcccctttccgctgtcctggcccacatggaggccacgggggtgcgcctggacgtggcctatctcagggccttgtccctggaggtggccgaggagatcgcccgcctcgaggccgaggtcttccgcctggccggccaccccttcaacctcaactcccgggaccagctggaaagggtcctctttgacgagctagggcttcccgccatcggcaagacggagaagaccggcaagcgctccaccagcgccgccgtcctggaggccctccgcgaggcccaccccatcgtggagaagatcctgcagtaccgggagctcaccaagctgaagagcacctacattgaccccttgccggacctcatccaccccaggacgggccgcctccacacccgcttcaaccagacggccacggccacgggcaggctaagtagctccgatcccaacctccagaacatccccgtccgcaccccgcttgggcagaggatccgccgggccttcatcgccgaggaggggtggctattggtggccctggactatagccagatagagctcagggtgctggcccacctctccggcgacgagaacctgatccgggtcttccaggaggggcgggacatccacacggagaccgccagctggatgttcggcgtcccccgggaggccgtggaccccctgatgcgccgggcggccaagaccatcaacttcggggtcctctacggcatgtcggcccaccgcctctcccaggagctagccatcccttacgaggaggcccaggccttcattgagcgctactttcagagcttccccaaggtgcgggcctggattgagaagaccctggaggagggcaggaggcgggggtacgtggagaccctcttcggccgccgccgctacgtgccagacctagaggcccgggtggtcagcgtgcgggaggcggccgagcgcatggccttcaacatgcccgtccagggcaccgccgccgacctcatgaagctggctatggtgaagctcttccccaggctggaggaaatgggggccaggatgctccttcaggtccacgacgagctggtcctcgaggccccaaaagagagggcggaggccgtggcccggctggccaaggaggtcatggagggggtgtatcccctggccgtgcccctggaggtggaggtggggataggggaggactggctctccgccaaggagtgataccaccccatgctggcccaagccagcatgggggccccggcaaaaggtttctggggaagttaccaggcatggtgggccgaaggaaacaggaaacaagggtatgagggttttttgccctaaagaaaggccagggggtcctcccgaaggaaggcttccagggggataccccctgggcccaggagtagcccctttcctccaaaggcctgggtgaaggcttttagccctttggtcctttgggaaggggcgcttttgacctccaaagccagaaggcgccttcccttcttcaagacgaagtcaacctcctggtccctttcccgccagtagtacacctcaaagcccccgtgggggccgtgggccagaaggtgggcgcccacggcggtttccacgagccgccccatgagggcggcgtccgcccacacctcctttggggaaagccccaagaccgccgtgatgagccccgtattaagggccaggagcttggggctcgaggcgcggcgccggaagggctcggcggcgtacttctgcag

SEQ ID NO: 3450 - DNA, 3026 bp, Artificial Sequence
  Description of Artificial Sequence: Synthetic DNA sequence of Thermus aquaticus DNA Polymerase E742A
atgagggggatgctgcccctctttgagcccaagggccgggtcctcctggtggacggccaccacctggcctaccgcaccttccacgccctgaagggcctcaccaccagccggggggagccggtgcaggcggtctacggcttcgccaagagcctcctcaaggccctcaaggaggacggggacgcggtgatcgtggtctttgacgccaaggccccctccttccgccacgaggcctacggggggtacaaggcgggccgggcccccacgccggaggactttccccggcaactcgccctcatcaaggagctggtggacctcctggggctggcgcgcctcgaggtcccgggctacgaggcggacgacgtcctggccagcctggccaagaaggcggaaaaggagggctacgaggtccgcatcctcaccgccgacaaagacctttaccagctcctttccgaccgcatccacgccctccaccccgaggggtacctcatcaccccggcctggctttgggaaaagtacggcctgaggcccgaccagtgggccgactaccgggccctgaccggggacgagtccgacaaccttcccggggtcaagggcatcggggagaagacggcgaggaagcttctggaggagtgggggagcctggaagccctcctcaagaacctggaccggctgaagcccgccatccgggagaagatcctggcccacatggacgatctgaagctctcctgggacctggccaaggtgcgcaccgacctgcccctggaggtggacttcgccaaaaggcgggagcccgaccgggagaggcttagggcctttctggagaggcttgagtttggcagcctcctccacgagttcggccttctggaaagccccaaggccctggaggaggccccctggcccccgccggaaggggccttcgtgggctttgtgctttcccgcaaggagcccatgtgggccgatcttctggccctggccgccgccagggggggccgggtccaccgggcccccgagccttataaagccctcagggacctgaaggaggcgcgggggcttctcgccaaagacctgagcgttctggccctgagggaaggccttggcctcccgcccggcgacgaccccatgctcctcgcctacctcctggacccttccaacaccacccccgagggggtggcccggcgctacggcggggagtggacggaggaggcgggggagcgggccgccctttccgagaggctcttcgccaacctgtgggggaggcttgagggggaggagaggctcctttggctttaccgggaggtggagaggcccctttccgctgtcctggcccacatggaggccacgggggtgcgcctggacgtggcctatctcagggccttgtccctggaggtggccgaggagatcgcccgcctcgaggccgaggtcttccgcctggccggccaccccttcaacctcaactcccgggaccagctggaaagggtcctctttgacgagctagggcttcccgccatcggcaagacggagaagaccggcaagcgctccaccagcgccgccgtcctggaggccctccgcgaggcccaccccatcgtggagaagatcctgcagtaccgggagctcaccaagctgaagagcacctacattgaccccttgccggacctcatccaccccaggacgggccgcctccacacccgcttcaaccagacggccacggccacgggcaggctaagtagctccgatcccaacctccagaacatccccgtccgcaccccgcttgggcagaggatccgccgggccttcatcgccgaggaggggtggctattggtggccctggactatagccagatagagctcagggtgctggcccacctctccggcgacgagaacctgatccgggtcttccaggaggggcgggacatccacacggagaccgccagctggatgttcggcgtcccccgggaggccgtggaccccctgatgcgccgggcggccaagaccatcaacttcggggtcctctacggcatgtcggcccaccgcctctcccaggagctagccatcccttacgaggaggcccaggccttcattgagcgctactttcagagcttccccaaggtgcgggcctggattgagaagaccctggaggagggcaggaggcgggggtacgtggagaccctcttcggccgccgccgctacgtgccagacctagaggcccgggtgaagagcgtgcgggctgcggccgagcgcatggccttcaacatgcccgtccagggcaccgccgccgacctcatgaagctggctatggtgaagctcttccccaggctggaggaaatgggggccaggatgctccttcaggtccacgacgagctggtcctcgaggccccaaaagagagggcggaggccgtggcccggctggccaaggaggtcatggagggggtgtatcccctggccgtgcccctggaggtggaggtggggataggggaggactggctctccgccaaggagtgataccaccccatgctggcccaagccagcatgggggccccggcaaaaggtttctggggaagttaccaggcatggtgggccgaaggaaacaggaaacaagggtatgagggttttttgccctaaagaaaggccagggggtcctcccgaaggaaggcttccagggggataccccctgggcccaggagtagcccctttcctccaaaggcctgggtgaaggcttttagccctttggtcctttgggaaggggcgcttttgacctccaaagccagaaggcgccttcccttcttcaagacgaagtcaacctcctggtccctttcccgccagtagtacacctcaaagcccccgtgggggccgtgggccagaaggtgggcgcccacggcggtttccacgagccgccccatgagggcggcgtccgcccacacctcctttggggaaagccccaagaccgccgtgatgagccccgtattaagggccaggagcttggggctcgaggcgcggcgccggaagggctcggcggcgtacttctgcag

SEQ ID NO: 3451 - DNA, 3026 bp, Artificial Sequence
  Description of Artificial Sequence: Synthetic DNA sequence of Thermus aquaticus DNA Polymerase E742R
atgagggggatgctgcccctctttgagcccaagggccgggtcctcctggtggacggccaccacctggcctaccgcaccttccacgccctgaagggcctcaccaccagccggggggagccggtgcaggcggtctacggcttcgccaagagcctcctcaaggccctcaaggaggacggggacgcggtgatcgtggtctttgacgccaaggccccctccttccgccacgaggcctacggggggtacaaggcgggccgggcccccacgccggaggactttccccggcaactcgccctcatcaaggagctggtggacctcctggggctggcgcgcctcgaggtcccgggctacgaggcggacgacgtcctggccagcctggccaagaaggcggaaaaggagggctacgaggtccgcatcctcaccgccgacaaagacctttaccagctcctttccgaccgcatccacgccctccaccccgaggggtacctcatcaccccggcctggctttgggaaaagtacggcctgaggcccgaccagtgggccgactaccgggccctgaccggggacgagtccgacaaccttcccggggtcaagggcatcggggagaagacggcgaggaagcttctggaggagtgggggagcctggaagccctcctcaagaacctggaccggctgaagcccgccatccgggagaagatcctggcccacatggacgatctgaagctctcctgggacctggccaaggtgcgcaccgacctgcccctggaggtggacttcgccaaaaggcgggagcccgaccgggagaggcttagggcctttctggagaggcttgagtttggcagcctcctccacgagttcggccttctggaaagccccaaggccctggaggaggccccctggcccccgccggaaggggccttcgtgggctttgtgctttcccgcaaggagcccatgtgggccgatcttctggccctggccgccgccagggggggccgggtccaccgggcccccgagccttataaagccctcagggacctgaaggaggcgcgggggcttctcgccaaagacctgagcgttctggccctgagggaaggccttggcctcccgcccggcgacgaccccatgctcctcgcctacctcctggacccttccaacaccacccccgagggggtggcccggcgctacggcggggagtggacggaggaggcgggggagcgggccgccctttccgagaggctcttcgccaacctgtgggggaggcttgagggggaggagaggctcctttggctttaccgggaggtggagaggcccctttccgctgtcctggcccacatggaggccacgggggtgcgcctggacgtggcctatctcagggccttgtccctggaggtggccgaggagatcgcccgcctcgaggccgaggtcttccgcctggccggccaccccttcaacctcaactcccgggaccagctggaaagggtcctctttgacgagctagggcttcccgccatcggcaagacggagaagaccggcaagcgctccaccagcgccgccgtcctggaggccctccgcgaggcccaccccatcgtggagaagatcctgcagtaccgggagctcaccaagctgaagagcacctacattgaccccttgccggacctcatccaccccaggacgggccgcctccacacccgcttcaaccagacggccacggccacgggcaggctaagtagctccgatcccaacctccagaacatccccgtccgcaccccgcttgggcagaggatccgccgggccttcatcgccgaggaggggtggctattggtggccctggactatagccagatagagctcagggtgctggcccacctctccggcgacgagaacctgatccgggtcttccaggaggggcgggacatccacacggagaccgccagctggatgttcggcgtcccccgggaggccgtggaccccctgatgcgccgggcggccaagaccatcaacttcggggtcctctacggcatgtcggcccaccgcctctcccaggagctagccatcccttacgaggaggcccaggccttcattgagcgctactttcagagcttccccaaggtgcgggcctggattgagaagaccctggaggagggcaggaggcgggggtacgtggagaccctcttcggccgccgccgctacgtgccagacctagaggcccgggtgaagagcgtgcggcgagcggccgagcgcatggccttcaacatgcccgtccagggcaccgccgccgacctcatgaagctggctatggtgaagctcttccccaggctggaggaaatgggggccaggatgctccttcaggtccacgacgagctggtcctcgaggccccaaaagagagggcggaggccgtggcccggctggccaaggaggtcatggagggggtgtatcccctggccgtgcccctggaggtggaggtggggataggggaggactggctctccgccaaggagtgataccaccccatgctggcccaagccagcatgggggccccggcaaaaggtttctggggaagttaccaggcatggtgggccgaaggaaacaggaaacaagggtatgagggttttttgccctaaagaaaggccagggggtcctcccgaaggaaggcttccagggggataccccctgggcccaggagtagcccctttcctccaaaggcctgggtgaaggcttttagccctttggtcctttgggaaggggcgcttttgacctccaaagccagaaggcgccttcccttcttcaagacgaagtcaacctcctggtccctttcccgccagtagtacacctcaaagcccccgtgggggccgtgggccagaaggtgggcgcccacggcggtttccacgagccgccccatgagggcggcgtccgcccacacctcctttggggaaagccccaagaccgccgtgatgagccccgtattaagggccaggagcttggggctcgaggcgcggcgccggaagggctcggcggcgtacttctgcag

SEQ ID NO: 3452 - DNA, 3026 bp, Artificial Sequence
  Description of Artificial Sequence: Synthetic DNA sequence of Thermus aquaticus DNA Polymerase E742C
atgagggggatgctgcccctctttgagcccaagggccgggtcctcctggtggacggccaccacctggcctaccgcaccttccacgccctgaagggcctcaccaccagccggggggagccggtgcaggcggtctacggcttcgccaagagcctcctcaaggccctcaaggaggacggggacgcggtgatcgtggtctttgacgccaaggccccctccttccgccacgaggcctacggggggtacaaggcgggccgggcccccacgccggaggactttccccggcaactcgccctcatcaaggagctggtggacctcctggggctggcgcgcctcgaggtcccgggctacgaggcggacgacgtcctggccagcctggccaagaaggcggaaaaggagggctacgaggtccgcatcctcaccgccgacaaagacctttaccagctcctttccgaccgcatccacgccctccaccccgaggggtacctcatcaccccggcctggctttgggaaaagtacggcctgaggcccgaccagtgggccgactaccgggccctgaccggggacgagtccgacaaccttcccggggtcaagggcatcggggagaagacggcgaggaagcttctggaggagtgggggagcctggaagccctcctcaagaacctggaccggctgaagcccgccatccgggagaagatcctggcccacatggacgatctgaagctctcctgggacctggccaaggtgcgcaccgacctgcccctggaggtggacttcgccaaaaggcgggagcccgaccgggagaggcttagggcctttctggagaggcttgagtttggcagcctcctccacgagttcggccttctggaaagccccaaggccctggaggaggccccctggcccccgccggaaggggccttcgtgggctttgtgctttcccgcaaggagcccatgtgggccgatcttctggccctggccgccgccagggggggccgggtccaccgggcccccgagccttataaagccctcagggacctgaaggaggcgcgggggcttctcgccaaagacctgagcgttctggccctgagggaaggccttggcctcccgcccggcgacgaccccatgctcctcgcctacctcctggacccttccaacaccacccccgagggggtggcccggcgctacggcggggagtggacggaggaggcgggggagcgggccgccctttccgagaggctcttcgccaacctgtgggggaggcttgagggggaggagaggctcctttggctttaccgggaggtggagaggcccctttccgctgtcctggcccacatggaggccacgggggtgcgcctggacgtggcctatctcagggccttgtccctggaggtggccgaggagatcgcccgcctcgaggccgaggtcttccgcctggccggccaccccttcaacctcaactcccgggaccagctggaaagggtcctctttgacgagctagggcttcccgccatcggcaagacggagaagaccggcaagcgctccaccagcgccgccgtcctggaggccctccgcgaggcccaccccatcgtggagaagatcctgcagtaccgggagctcaccaagctgaagagcacctacattgaccccttgccggacctcatccaccccaggacgggccgcctccacacccgcttcaaccagacggccacggccacgggcaggctaagtagctccgatcccaacctccagaacatccccgtccgcaccccgcttgggcagaggatccgccgggccttcatcgccgaggaggggtggctattggtggccctggactatagccagatagagctcagggtgctggcccacctctccggcgacgagaacctgatccgggtcttccaggaggggcgggacatccacacggagaccgccagctggatgttcggcgtcccccgggaggccgtggaccccctgatgcgccgggcggccaagaccatcaacttcggggtcctctacggcatgtcggcccaccgcctctcccaggagctagccatcccttacgaggaggcccaggccttcattgagcgctactttcagagcttccccaaggtgcgggcctggattgagaagaccctggaggagggcaggaggcgggggtacgtggagaccctcttcggccgccgccgctacgtgccagacctagaggcccgggtgaagagcgtgcggtgtgcggccgagcgcatggccttcaacatgcccgtccagggcaccgccgccgacctcatgaagctggctatggtgaagctcttccccaggctggaggaaatgggggccaggatgctccttcaggtccacgacgagctggtcctcgaggccccaaaagagagggcggaggccgtggcccggctggccaaggaggtcatggagggggtgtatcccctggccgtgcccctggaggtggaggtggggataggggaggactggctctccgccaaggagtgataccaccccatgctggcccaagccagcatgggggccccggcaaaaggtttctggggaagttaccaggcatggtgggccgaaggaaacaggaaacaagggtatgagggttttttgccctaaagaaaggccagggggtcctcccgaaggaaggcttccagggggataccccctgggcccaggagtagcccctttcctccaaaggcctgggtgaaggcttttagccctttggtcctttgggaaggggcgcttttgacctccaaagccagaaggcgccttcccttcttcaagacgaagtcaacctcctggtccctttcccgccagtagtacacctcaaagcccccgtgggggccgtgggccagaaggtgggcgcccacggcggtttccacgagccgccccatgagggcggcgtccgcccacacctcctttggggaaagccccaagaccgccgtgatgagccccgtattaagggccaggagcttggggctcgaggcgcggcgccggaagggctcggcggcgtacttctgcag

SEQ ID NO: 3453 - DNA, 3026 bp, Artificial Sequence
  Description of Artificial Sequence: Synthetic DNA sequence of Thermus aquaticus DNA Polymerase E742G
atgagggggatgctgcccctctttgagcccaagggccgggtcctcctggtggacggccaccacctggcctaccgcaccttccacgccctgaagggcctcaccaccagccggggggagccggtgcaggcggtctacggcttcgccaagagcctcctcaaggccctcaaggaggacggggacgcggtgatcgtggtctttgacgccaaggccccctccttccgccacgaggcctacggggggtacaaggcgggccgggcccccacgccggaggactttccccggcaactcgccctcatcaaggagctggtggacctcctggggctggcgcgcctcgaggtcccgggctacgaggcggacgacgtcctggccagcctggccaagaaggcggaaaaggagggctacgaggtccgcatcctcaccgccgacaaagacctttaccagctcctttccgaccgcatccacgccctccaccccgaggggtacctcatcaccccggcctggctttgggaaaagtacggcctgaggcccgaccagtgggccgactaccgggccctgaccggggacgagtccgacaaccttcccggggtcaagggcatcggggagaagacggcgaggaagcttctggaggagtgggggagcctggaagccctcctcaagaacctggaccggctgaagcccgccatccgggagaagatcctggcccacatggacgatctgaagctctcctgggacctggccaaggtgcgcaccgacctgcccctggaggtggacttcgccaaaaggcgggagcccgaccgggagaggcttagggcctttctggagaggcttgagtttggcagcctcctccacgagttcggccttctggaaagccccaaggccctggaggaggccccctggcccccgccggaaggggccttcgtgggctttgtgctttcccgcaaggagcccatgtgggccgatcttctggccctggccgccgccagggggggccgggtccaccgggcccccgagccttataaagccctcagggacctgaaggaggcgcgggggcttctcgccaaagacctgagcgttctggccctgagggaaggccttggcctcccgcccggcgacgaccccatgctcctcgcctacctcctggacccttccaacaccacccccgagggggtggcccggcgctacggcggggagtggacggaggaggcgggggagcgggccgccctttccgagaggctcttcgccaacctgtgggggaggcttgagggggaggagaggctcctttggctttaccgggaggtggagaggcccctttccgctgtcctggcccacatggaggccacgggggtgcgcctggacgtggcctatctcagggccttgtccctggaggtggccgaggagatcgcccgcctcgaggccgaggtcttccgcctggccggccaccccttcaacctcaactcccgggaccagctggaaagggtcctctttgacgagctagggcttcccgccatcggcaagacggagaagaccggcaagcgctccaccagcgccgccgtcctggaggccctccgcgaggcccaccccatcgtggagaagatcctgcagtaccgggagctcaccaagctgaagagcacctacattgaccccttgccggacctcatccaccccaggacgggccgcctccacacccgcttcaaccagacggccacggccacgggcaggctaagtagctccgatcccaacctccagaacatccccgtccgcaccccgcttgggcagaggatccgccgggccttcatcgccgaggaggggtggctattggtggccctggactatagccagatagagctcagggtgctggcccacctctccggcgacgagaacctgatccgggtcttccaggaggggcgggacatccacacggagaccgccagctggatgttcggcgtcccccgggaggccgtggaccccctgatgcgccgggcggccaagaccatcaacttcggggtcctctacggcatgtcggcccaccgcctctcccaggagctagccatcccttacgaggaggcccaggccttcattgagcgctactttcagagcttccccaaggtgcgggcctggattgagaagaccctggaggagggcaggaggcgggggtacgtggagaccctcttcggccgccgccgctacgtgccagacctagaggcccgggtgaagagcgtgcggggtgcggccgagcgcatggccttcaacatgcccgtccagggcaccgccgccgacctcatgaagctggctatggtgaagctcttccccaggctggaggaaatgggggccaggatgctccttcaggtccacgacgagctggtcctcgaggccccaaaagagagggcggaggccgtggcccggctggccaaggaggtcatggagggggtgtatcccctggccgtgcccctggaggtggaggtggggataggggaggactggctctccgccaaggagtgataccaccccatgctggcccaagccagcatgggggccccggcaaaaggtttctggggaagttaccaggcatggtgggccgaaggaaacaggaaacaagggtatgagggttttttgccctaaagaaaggccagggggtcctcccgaaggaaggcttccagggggataccccctgggcccaggagtagcccctttcctccaaaggcctgggtgaaggcttttagccctttggtcctttgggaaggggcgcttttgacctccaaagccagaaggcgccttcccttcttcaagacgaagtcaacctcctggtccctttcccgccagtagtacacctcaaagcccccgtgggggccgtgggccagaaggtgggcgcccacggcggtttccacgagccgccccatgagggcggcgtccgcccacacctcctttggggaaagccccaagaccgccgtgatgagccccgtattaagggccaggagcttggggctcgaggcgcggcgccggaagggctcggcggcgtacttctgcag

SEQ ID NO: 3454 - DNA, 3026 bp, Artificial Sequence
  Description of Artificial Sequence: Synthetic DNA sequence of Thermus aquaticus DNA Polymerase E742Q
atgagggggatgctgcccctctttgagcccaagggccgggtcctcctggtggacggccaccacctggcctaccgcaccttccacgccctgaagggcctcaccaccagccggggggagccggtgcaggcggtctacggcttcgccaagagcctcctcaaggccctcaaggaggacggggacgcggtgatcgtggtctttgacgccaaggccccctccttccgccacgaggcctacggggggtacaaggcgggccgggcccccacgccggaggactttccccggcaactcgccctcatcaaggagctggtggacctcctggggctggcgcgcctcgaggtcccgggctacgaggcggacgacgtcctggccagcctggccaagaaggcggaaaaggagggctacgaggtccgcatcctcaccgccgacaaagacctttaccagctcctttccgaccgcatccacgccctccaccccgaggggtacctcatcaccccggcctggctttgggaaaagtacggcctgaggcccgaccagtgggccgactaccgggccctgaccggggacgagtccgacaaccttcccggggtcaagggcatcggggagaagacggcgaggaagcttctggaggagtgggggagcctggaagccctcctcaagaacctggaccggctgaagcccgccatccgggagaagatcctggcccacatggacgatctgaagctctcctgggacctggccaaggtgcgcaccgacctgcccctggaggtggacttcgccaaaaggcgggagcccgaccgggagaggcttagggcctttctggagaggcttgagtttggcagcctcctccacgagttcggccttctggaaagccccaaggccctggaggaggccccctggcccccgccggaaggggccttcgtgggctttgtgctttcccgcaaggagcccatgtgggccgatcttctggccctggccgccgccagggggggccgggtccaccgggcccccgagccttataaagccctcagggacctgaaggaggcgcgggggcttctcgccaaagacctgagcgttctggccctgagggaaggccttggcctcccgcccggcgacgaccccatgctcctcgcctacctcctggacccttccaacaccacccccgagggggtggcccggcgctacggcggggagtggacggaggaggcgggggagcgggccgccctttccgagaggctcttcgccaacctgtgggggaggcttgagggggaggagaggctcctttggctttaccgggaggtggagaggcccctttccgctgtcctggcccacatggaggccacgggggtgcgcctggacgtggcctatctcagggccttgtccctggaggtggccgaggagatcgcccgcctcgaggccgaggtcttccgcctggccggccaccccttcaacctcaactcccgggaccagctggaaagggtcctctttgacgagctagggcttcccgccatcggcaagacggagaagaccggcaagcgctccaccagcgccgccgtcctggaggccctccgcgaggcccaccccatcgtggagaagatcctgcagtaccgggagctcaccaagctgaagagcacctacattgaccccttgccggacctcatccaccccaggacgggccgcctccacacccgcttcaaccagacggccacggccacgggcaggctaagtagctccgatcccaacctccagaacatccccgtccgcaccccgcttgggcagaggatccgccgggccttcatcgccgaggaggggtggctattggtggccctggactatagccagatagagctcagggtgctggcccacctctccggcgacgagaacctgatccgggtcttccaggaggggcgggacatccacacggagaccgccagctggatgttcggcgtcccccgggaggccgtggaccccctgatgcgccgggcggccaagaccatcaacttcggggtcctctacggcatgtcggcccaccgcctctcccaggagctagccatcccttacgaggaggcccaggccttcattgagcgctactttcagagcttccccaaggtgcgggcctggattgagaagaccctggaggagggcaggaggcgggggtacgtggagaccctcttcggccgccgccgctacgtgccagacctagaggcccgggtgaagagcgtgcggcaagcggccgagcgcatggccttcaacatgcccgtccagggcaccgccgccgacctcatgaagctggctatggtgaagctcttccccaggctggaggaaatgggggccaggatgctccttcaggtccacgacgagctggtcctcgaggccccaaaagagagggcggaggccgtggcccggctggccaaggaggtcatggagggggtgtatcccctggccgtgcccctggaggtggaggtggggataggggaggactggctctccgccaaggagtgataccaccccatgctggcccaagccagcatgggggccccggcaaaaggtttctggggaagttaccaggcatggtgggccgaaggaaacaggaaacaagggtatgagggttttttgccctaaagaaaggccagggggtcctcccgaaggaaggcttccagggggataccccctgggcccaggagtagcccctttcctccaaaggcctgggtgaaggcttttagccctttggtcctttgggaaggggcgcttttgacctccaaagccagaaggcgccttcccttcttcaagacgaagtcaacctcctggtccctttcccgccagtagtacacctcaaagcccccgtgggggccgtgggccagaaggtgggcgcccacggcggtttccacgagccgccccatgagggcggcgtccgcccacacctcctttggggaaagccccaagaccgccgtgatgagccccgtattaagggccaggagcttggggctcgaggcgcggcgccggaagggctcggcggcgtacttctgcag

SEQ ID NO: 3455 - DNA, 3026 bp, Artificial Sequence
  Description of Artificial Sequence: Synthetic DNA sequence of Thermus aquaticus DNA Polymerase E742H
atgagggggatgctgcccctctttgagcccaagggccgggtcctcctggtggacggccaccacctggcctaccgcaccttccacgccctgaagggcctcaccaccagccggggggagccggtgcaggcggtctacggcttcgccaagagcctcctcaaggccctcaaggaggacggggacgcggtgatcgtggtctttgacgccaaggccccctccttccgccacgaggcctacggggggtacaaggcgggccgggcccccacgccggaggactttccccggcaactcgccctcatcaaggagctggtggacctcctggggctggcgcgcctcgaggtcccgggctacgaggcggacgacgtcctggccagcctggccaagaaggcggaaaaggagggctacgaggtccgcatcctcaccgccgacaaagacctttaccagctcctttccgaccgcatccacgccctccaccccgaggggtacctcatcaccccggcctggctttgggaaaagtacggcctgaggcccgaccagtgggccgactaccgggccctgaccggggacgagtccgacaaccttcccggggtcaagggcatcggggagaagacggcgaggaagcttctggaggagtgggggagcctggaagccctcctcaagaacctggaccggctgaagcccgccatccgggagaagatcctggcccacatggacgatctgaagctctcctgggacctggccaaggtgcgcaccgacctgcccctggaggtggacttcgccaaaaggcgggagcccgaccgggagaggcttagggcctttctggagaggcttgagtttggcagcctcctccacgagttcggccttctggaaagccccaaggccctggaggaggccccctggcccccgccggaaggggccttcgtgggctttgtgctttcccgcaaggagcccatgtgggccgatcttctggccctggccgccgccagggggggccgggtccaccgggcccccgagccttataaagccctcagggacctgaaggaggcgcgggggcttctcgccaaagacctgagcgttctggccctgagggaaggccttggcctcccgcccggcgacgaccccatgctcctcgcctacctcctggacccttccaacaccacccccgagggggtggcccggcgctacggcggggagtggacggaggaggcgggggagcgggccgccctttccgagaggctcttcgccaacctgtgggggaggcttgagggggaggagaggctcctttggctttaccgggaggtggagaggcccctttccgctgtcctggcccacatggaggccacgggggtgcgcctggacgtggcctatctcagggccttgtccctggaggtggccgaggagatcgcccgcctcgaggccgaggtcttccgcctggccggccaccccttcaacctcaactcccgggaccagctggaaagggtcctctttgacgagctagggcttcccgccatcggcaagacggagaagaccggcaagcgctccaccagcgccgccgtcctggaggccctccgcgaggcccaccccatcgtggagaagatcctgcagtaccgggagctcaccaagctgaagagcacctacattgaccccttgccggacctcatccaccccaggacgggccgcctccacacccgcttcaaccagacggccacggccacgggcaggctaagtagctccgatcccaacctccagaacatccccgtccgcaccccgcttgggcagaggatccgccgggccttcatcgccgaggaggggtggctattggtggccctggactatagccagatagagctcagggtgctggcccacctctccggcgacgagaacctgatccgggtcttccaggaggggcgggacatccacacggagaccgccagctggatgttcggcgtcccccgggaggccgtggaccccctgatgcgccgggcggccaagaccatcaacttcggggtcctctacggcatgtcggcccaccgcctctcccaggagctagccatcccttacgaggaggcccaggccttcattgagcgctactttcagagcttccccaaggtgcgggcctggattgagaagaccctggaggagggcaggaggcgggggtacgtggagaccctcttcggccgccgccgctacgtgccagacctagaggcccgggtgaagagcgtgcggcatgcggccgagcgcatggccttcaacatgcccgtccagggcaccgccgccgacctcatgaagctggctatggtgaagctcttccccaggctggaggaaatgggggccaggatgctccttcaggtccacgacgagctggtcctcgaggccccaaaagagagggcggaggccgtggcccggctggccaaggaggtcatggagggggtgtatcccctggccgtgcccctggaggtggaggtggggataggggaggactggctctccgccaaggagtgataccaccccatgctggcccaagccagcatgggggccccggcaaaaggtttctggggaagttaccaggcatggtgggccgaaggaaacaggaaacaagggtatgagggttttttgccctaaagaaaggccagggggtcctcccgaaggaaggcttccagggggataccccctgggcccaggagtagcccctttcctccaaaggcctgggtgaaggcttttagccctttggtcctttgggaaggggcgcttttgacctccaaagccagaaggcgccttcccttcttcaagacgaagtcaacctcctggtccctttcccgccagtagtacacctcaaagcccccgtgggggccgtgggccagaaggtgggcgcccacggcggtttccacgagccgccccatgagggcggcgtccgcccacacctcctttggggaaagccccaagaccgccgtgatgagccccgtattaagggccaggagcttggggctcgaggcgcggcgccggaagggctcggcggcgtacttctgcag

SEQ ID NO: 3456 - DNA, 3026 bp, Artificial Sequence
  Description of Artificial Sequence: Synthetic DNA sequence of Thermus aquaticus DNA Polymerase E742I
atgagggggatgctgcccctctttgagcccaagggccgggtcctcctggtggacggccaccacctggcctaccgcaccttccacgccctgaagggcctcaccaccagccggggggagccggtgcaggcggtctacggcttcgccaagagcctcctcaaggccctcaaggaggacggggacgcggtgatcgtggtctttgacgccaaggccccctccttccgccacgaggcctacggggggtacaaggcgggccgggcccccacgccggaggactttccccggcaactcgccctcatcaaggagctggtggacctcctggggctggcgcgcctcgaggtcccgggctacgaggcggacgacgtcctggccagcctggccaagaaggcggaaaaggagggctacgaggtccgcatcctcaccgccgacaaagacctttaccagctcctttccgaccgcatccacgccctccaccccgaggggtacctcatcaccccggcctggctttgggaaaagtacggcctgaggcccgaccagtgggccgactaccgggccctgaccggggacgagtccgacaaccttcccggggtcaagggcatcggggagaagacggcgaggaagcttctggaggagtgggggagcctggaagccctcctcaagaacctggaccggctgaagcccgccatccgggagaagatcctggcccacatggacgatctgaagctctcctgggacctggccaaggtgcgcaccgacctgcccctggaggtggacttcgccaaaaggcgggagcccgaccgggagaggcttagggcctttctggagaggcttgagtttggcagcctcctccacgagttcggccttctggaaagccccaaggccctggaggaggccccctggcccccgccggaaggggccttcgtgggctttgtgctttcccgcaaggagcccatgtgggccgatcttctggccctggccgccgccagggggggccgggtccaccgggcccccgagccttataaagccctcagggacctgaaggaggcgcgggggcttctcgccaaagacctgagcgttctggccctgagggaaggccttggcctcccgcccggcgacgaccccatgctcctcgcctacctcctggacccttccaacaccacccccgagggggtggcccggcgctacggcggggagtggacggaggaggcgggggagcgggccgccctttccgagaggctcttcgccaacctgtgggggaggcttgagggggaggagaggctcctttggctttaccgggaggtggagaggcccctttccgctgtcctggcccacatggaggccacgggggtgcgcctggacgtggcctatctcagggccttgtccctggaggtggccgaggagatcgcccgcctcgaggccgaggtcttccgcctggccggccaccccttcaacctcaactcccgggaccagctggaaagggtcctctttgacgagctagggcttcccgccatcggcaagacggagaagaccggcaagcgctccaccagcgccgccgtcctggaggccctccgcgaggcccaccccatcgtggagaagatcctgcagtaccgggagctcaccaagctgaagagcacctacattgaccccttgccggacctcatccaccccaggacgggccgcctccacacccgcttcaaccagacggccacggccacgggcaggctaagtagctccgatcccaacctccagaacatccccgtccgcaccccgcttgggcagaggatccgccgggccttcatcgccgaggaggggtggctattggtggccctggactatagccagatagagctcagggtgctggcccacctctccggcgacgagaacctgatccgggtcttccaggaggggcgggacatccacacggagaccgccagctggatgttcggcgtcccccgggaggccgtggaccccctgatgcgccgggcggccaagaccatcaacttcggggtcctctacggcatgtcggcccaccgcctctcccaggagctagccatcccttacgaggaggcccaggccttcattgagcgctactttcagagcttccccaaggtgcgggcctggattgagaagaccctggaggagggcaggaggcgggggtacgtggagaccctcttcggccgccgccgctacgtgccagacctagaggcccgggtgaagagcgtgcggattgcggccgagcgcatggccttcaacatgcccgtccagggcaccgccgccgacctcatgaagctggctatggtgaagctcttccccaggctggaggaaatgggggccaggatgctccttcaggtccacgacgagctggtcctcgaggccccaaaagagagggcggaggccgtggcccggctggccaaggaggtcatggagggggtgtatcccctggccgtgcccctggaggtggaggtggggataggggaggactggctctccgccaaggagtgataccaccccatgctggcccaagccagcatgggggccccggcaaaaggtttctggggaagttaccaggcatggtgggccgaaggaaacaggaaacaagggtatgagggttttttgccctaaagaaaggccagggggtcctcccgaaggaaggcttccagggggataccccctgggcccaggagtagcccctttcctccaaaggcctgggtgaaggcttttagccctttggtcctttgggaaggggcgcttttgacctccaaagccagaaggcgccttcccttcttcaagacgaagtcaacctcctggtccctttcccgccagtagtacacctcaaagcccccgtgggggccgtgggccagaaggtgggcgcccacggcggtttccacgagccgccccatgagggcggcgtccgcccacacctcctttggggaaagccccaagaccgccgtgatgagccccgtattaagggccaggagcttggggctcgaggcgcggcgccggaagggctcggcggcgtacttctgcag

SEQ ID NO: 3457 - DNA, 3026 bp, Artificial Sequence
  Description of Artificial Sequence: Synthetic DNA sequence of Thermus aquaticus DNA Polymerase E742L
atgagggggatgctgcccctctttgagcccaagggccgggtcctcctggtggacggccaccacctggcctaccgcaccttccacgccctgaagggcctcaccaccagccggggggagccggtgcaggcggtctacggcttcgccaagagcctcctcaaggccctcaaggaggacggggacgcggtgatcgtggtctttgacgccaaggccccctccttccgccacgaggcctacggggggtacaaggcgggccgggcccccacgccggaggactttccccggcaactcgccctcatcaaggagctggtggacctcctggggctggcgcgcctcgaggtcccgggctacgaggcggacgacgtcctggccagcctggccaagaaggcggaaaaggagggctacgaggtccgcatcctcaccgccgacaaagacctttaccagctcctttccgaccgcatccacgccctccaccccgaggggtacctcatcaccccggcctggctttgggaaaagtacggcctgaggcccgaccagtgggccgactaccgggccctgaccggggacgagtccgacaaccttcccggggtcaagggcatcggggagaagacggcgaggaagcttctggaggagtgggggagcctggaagccctcctcaagaacctggaccggctgaagcccgccatccgggagaagatcctggcccacatggacgatctgaagctctcctgggacctggccaaggtgcgcaccgacctgcccctggaggtggacttcgccaaaaggcgggagcccgaccgggagaggcttagggcctttctggagaggcttgagtttggcagcctcctccacgagttcggccttctggaaagccccaaggccctggaggaggccccctggcccccgccggaaggggccttcgtgggctttgtgctttcccgcaaggagcccatgtgggccgatcttctggccctggccgccgccagggggggccgggtccaccgggcccccgagccttataaagccctcagggacctgaaggaggcgcgggggcttctcgccaaagacctgagcgttctggccctgagggaaggccttggcctcccgcccggcgacgaccccatgctcctcgcctacctcctggacccttccaacaccacccccgagggggtggcccggcgctacggcggggagtggacggaggaggcgggggagcgggccgccctttccgagaggctcttcgccaacctgtgggggaggcttgagggggaggagaggctcctttggctttaccgggaggtggagaggcccctttccgctgtcctggcccacatggaggccacgggggtgcgcctggacgtggcctatctcagggccttgtccctggaggtggccgaggagatcgcccgcctcgaggccgaggtcttccgcctggccggccaccccttcaacctcaactcccgggaccagctggaaagggtcctctttgacgagctagggcttcccgccatcggcaagacggagaagaccggcaagcgctccaccagcgccgccgtcctggaggccctccgcgaggcccaccccatcgtggagaagatcctgcagtaccgggagctcaccaagctgaagagcacctacattgaccccttgccggacctcatccaccccaggacgggccgcctccacacccgcttcaaccagacggccacggccacgggcaggctaagtagctccgatcccaacctccagaacatccccgtccgcaccccgcttgggcagaggatccgccgggccttcatcgccgaggaggggtggctattggtggccctggactatagccagatagagctcagggtgctggcccacctctccggcgacgagaacctgatccgggtcttccaggaggggcgggacatccacacggagaccgccagctggatgttcggcgtcccccgggaggccgtggaccccctgatgcgccgggcggccaagaccatcaacttcggggtcctctacggcatgtcggcccaccgcctctcccaggagctagccatcccttacgaggaggcccaggccttcattgagcgctactttcagagcttccccaaggtgcgggcctggattgagaagaccctggaggagggcaggaggcgggggtacgtggagaccctcttcggccgccgccgctacgtgccagacctagaggcccgggtgaagagcgtgcggttagcggccgagcgcatggccttcaacatgcccgtccagggcaccgccgccgacctcatgaagctggctatggtgaagctcttccccaggctggaggaaatgggggccaggatgctccttcaggtccacgacgagctggtcctcgaggccccaaaagagagggcggaggccgtggcccggctggccaaggaggtcatggagggggtgtatcccctggccgtgcccctggaggtggaggtggggataggggaggactggctctccgccaaggagtgataccaccccatgctggcccaagccagcatgggggccccggcaaaaggtttctggggaagttaccaggcatggtgggccgaaggaaacaggaaacaagggtatgagggttttttgccctaaagaaaggccagggggtcctcccgaaggaaggcttccagggggataccccctgggcccaggagtagcccctttcctccaaaggcctgggtgaaggcttttagccctttggtcctttgggaaggggcgcttttgacctccaaagccagaaggcgccttcccttcttcaagacgaagtcaacctcctggtccctttcccgccagtagtacacctcaaagcccccgtgggggccgtgggccagaaggtgggcgcccacggcggtttccacgagccgccccatgagggcggcgtccgcccacacctcctttggggaaagccccaagaccgccgtgatgagccccgtattaagggccaggagcttggggctcgaggcgcggcgccggaagggctcggcggcgtacttctgcag

SEQ ID NO: 3458 - DNA, 3026 bp, Artificial Sequence
  Description of Artificial Sequence: Synthetic DNA sequence of Thermus aquaticus DNA Polymerase E742K
atgagggggatgctgcccctctttgagcccaagggccgggtcctcctggtggacggccaccacctggcctaccgcaccttccacgccctgaagggcctcaccaccagccggggggagccggtgcaggcggtctacggcttcgccaagagcctcctcaaggccctcaaggaggacggggacgcggtgatcgtggtctttgacgccaaggccccctccttccgccacgaggcctacggggggtacaaggcgggccgggcccccacgccggaggactttccccggcaactcgccctcatcaaggagctggtggacctcctggggctggcgcgcctcgaggtcccgggctacgaggcggacgacgtcctggccagcctggccaagaaggcggaaaaggagggctacgaggtccgcatcctcaccgccgacaaagacctttaccagctcctttccgaccgcatccacgccctccaccccgaggggtacctcatcaccccggcctggctttgggaaaagtacggcctgaggcccgaccagtgggccgactaccgggccctgaccggggacgagtccgacaaccttcccggggtcaagggcatcggggagaagacggcgaggaagcttctggaggagtgggggagcctggaagccctcctcaagaacctggaccggctgaagcccgccatccgggagaagatcctggcccacatggacgatctgaagctctcctgggacctggccaaggtgcgcaccgacctgcccctggaggtggacttcgccaaaaggcgggagcccgaccgggagaggcttagggcctttctggagaggcttgagtttggcagcctcctccacgagttcggccttctggaaagccccaaggccctggaggaggccccctggcccccgccggaaggggccttcgtgggctttgtgctttcccgcaaggagcccatgtgggccgatcttctggccctggccgccgccagggggggccgggtccaccgggcccccgagccttataaagccctcagggacctgaaggaggcgcgggggcttctcgccaaagacctgagcgttctggccctgagggaaggccttggcctcccgcccggcgacgaccccatgctcctcgcctacctcctggacccttccaacaccacccccgagggggtggcccggcgctacggcggggagtggacggaggaggcgggggagcgggccgccctttccgagaggctcttcgccaacctgtgggggaggcttgagggggaggagaggctcctttggctttaccgggaggtggagaggcccctttccgctgtcctggcccacatggaggccacgggggtgcgcctggacgtggcctatctcagggccttgtccctggaggtggccgaggagatcgcccgcctcgaggccgaggtcttccgcctggccggccaccccttcaacctcaactcccgggaccagctggaaagggtcctctttgacgagctagggcttcccgccatcggcaagacggagaagaccggcaagcgctccaccagcgccgccgtcctggaggccctccgcgaggcccaccccatcgtggagaagatcctgcagtaccgggagctcaccaagctgaagagcacctacattgaccccttgccggacctcatccaccccaggacgggccgcctccacacccgcttcaaccagacggccacggccacgggcaggctaagtagctccgatcccaacctccagaacatccccgtccgcaccccgcttgggcagaggatccgccgggccttcatcgccgaggaggggtggctattggtggccctggactatagccagatagagctcagggtgctggcccacctctccggcgacgagaacctgatccgggtcttccaggaggggcgggacatccacacggagaccgccagctggatgttcggcgtcccccgggaggccgtggaccccctgatgcgccgggcggccaagaccatcaacttcggggtcctctacggcatgtcggcccaccgcctctcccaggagctagccatcccttacgaggaggcccaggccttcattgagcgctactttcagagcttccccaaggtgcgggcctggattgagaagaccctggaggagggcaggaggcgggggtacgtggagaccctcttcggccgccgccgctacgtgccagacctagaggcccgggtgaagagcgtgcggaaagcggccgagcgcatggccttcaacatgcccgtccagggcaccgccgccgacctcatgaagctggctatggtgaagctcttccccaggctggaggaaatgggggccaggatgctccttcaggtccacgacgagctggtcctcgaggccccaaaagagagggcggaggccgtggcccggctggccaaggaggtcatggagggggtgtatcccctggccgtgcccctggaggtggaggtggggataggggaggactggctctccgccaaggagtgataccaccccatgctggcccaagccagcatgggggccccggcaaaaggtttctggggaagttaccaggcatggtgggccgaaggaaacaggaaacaagggtatgagggttttttgccctaaagaaaggccagggggtcctcccgaaggaaggcttccagggggataccccctgggcccaggagtagcccctttcctccaaaggcctgggtgaaggcttttagccctttggtcctttgggaaggggcgcttttgacctccaaagccagaaggcgccttcccttcttcaagacgaagtcaacctcctggtccctttcccgccagtagtacacctcaaagcccccgtgggggccgtgggccagaaggtgggcgcccacggcggtttccacgagccgccccatgagggcggcgtccgcccacacctcctttggggaaagccccaagaccgccgtgatgagccccgtattaagggccaggagcttggggctcgaggcgcggcgccggaagggctcggcggcgtacttctgcag

SEQ ID NO: 3459 - DNA, 3026 bp, Artificial Sequence
  Description of Artificial Sequence: Synthetic DNA sequence of Thermus aquaticus DNA Polymerase E742D
atgagggggatgctgcccctctttgagcccaagggccgggtcctcctggtggacggccaccacctggcctaccgcaccttccacgccctgaagggcctcaccaccagccggggggagccggtgcaggcggtctacggcttcgccaagagcctcctcaaggccctcaaggaggacggggacgcggtgatcgtggtctttgacgccaaggccccctccttccgccacgaggcctacggggggtacaaggcgggccgggcccccacgccggaggactttccccggcaactcgccctcatcaaggagctggtggacctcctggggctggcgcgcctcgaggtcccgggctacgaggcggacgacgtcctggccagcctggccaagaaggcggaaaaggagggctacgaggtccgcatcctcaccgccgacaaagacctttaccagctcctttccgaccgcatccacgccctccaccccgaggggtacctcatcaccccggcctggctttgggaaaagtacggcctgaggcccgaccagtgggccgactaccgggccctgaccggggacgagtccgacaaccttcccggggtcaagggcatcggggagaagacggcgaggaagcttctggaggagtgggggagcctggaagccctcctcaagaacctggaccggctgaagcccgccatccgggagaagatcctggcccacatggacgatctgaagctctcctgggacctggccaaggtgcgcaccgacctgcccctggaggtggacttcgccaaaaggcgggagcccgaccgggagaggcttagggcctttctggagaggcttgagtttggcagcctcctccacgagttcggccttctggaaagccccaaggccctggaggaggccccctggcccccgccggaaggggccttcgtgggctttgtgctttcccgcaaggagcccatgtgggccgatcttctggccctggccgccgccagggggggccgggtccaccgggcccccgagccttataaagccctcagggacctgaaggaggcgcgggggcttctcgccaaagacctgagcgttctggccctgagggaaggccttggcctcccgcccggcgacgaccccatgctcctcgcctacctcctggacccttccaacaccacccccgagggggtggcccggcgctacggcggggagtggacggaggaggcgggggagcgggccgccctttccgagaggctcttcgccaacctgtgggggaggcttgagggggaggagaggctcctttggctttaccgggaggtggagaggcccctttccgctgtcctggcccacatggaggccacgggggtgcgcctggacgtggcctatctcagggccttgtccctggaggtggccgaggagatcgcccgcctcgaggccgaggtcttccgcctggccggccaccccttcaacctcaactcccgggaccagctggaaagggtcctctttgacgagctagggcttcccgccatcggcaagacggagaagaccggcaagcgctccaccagcgccgccgtcctggaggccctccgcgaggcccaccccatcgtggagaagatcctgcagtaccgggagctcaccaagctgaagagcacctacattgaccccttgccggacctcatccaccccaggacgggccgcctccacacccgcttcaaccagacggccacggccacgggcaggctaagtagctccgatcccaacctccagaacatccccgtccgcaccccgcttgggcagaggatccgccgggccttcatcgccgaggaggggtggctattggtggccctggactatagccagatagagctcagggtgctggcccacctctccggcgacgagaacctgatccgggtcttccaggaggggcgggacatccacacggagaccgccagctggatgttcggcgtcccccgggaggccgtggaccccctgatgcgccgggcggccaagaccatcaacttcggggtcctctacggcatgtcggcccaccgcctctcccaggagctagccatcccttacgaggaggcccaggccttcattgagcgctactttcagagcttccccaaggtgcgggcctggattgagaagaccctggaggagggcaggaggcgggggtacgtggagaccctcttcggccgccgccgctacgtgccagacctagaggcccgggtgaagagcgtgcgggatgcggccgagcgcatggccttcaacatgcccgtccagggcaccgccgccgacctcatgaagctggctatggtgaagctcttccccaggctggaggaaatgggggccaggatgctccttcaggtccacgacgagctggtcctcgaggccccaaaagagagggcggaggccgtggcccggctggccaaggaggtcatggagggggtgtatcccctggccgtgcccctggaggtggaggtggggataggggaggactggctctccgccaaggagtgataccaccccatgctggcccaagccagcatgggggccccggcaaaaggtttctggggaagttaccaggcatggtgggccgaaggaaacaggaaacaagggtatgagggttttttgccctaaagaaaggccagggggtcctcccgaaggaaggcttccagggggataccccctgggcccaggagtagcccctttcctccaaaggcctgggtgaaggcttttagccctttggtcctttgggaaggggcgcttttgacctccaaagccagaaggcgccttcccttcttcaagacgaagtcaacctcctggtccctttcccgccagtagtacacctcaaagcccccgtgggggccgtgggccagaaggtgggcgcccacggcggtttccacgagccgccccatgagggcggcgtccgcccacacctcctttggggaaagccccaagaccgccgtgatgagccccgtattaagggccaggagcttggggctcgaggcgcggcgccggaagggctcggcggcgtacttctgcag

SEQ ID NO: 3460 - DNA, 3026 bp, Artificial Sequence
  Description of Artificial Sequence: Synthetic DNA sequence of Thermus aquaticus DNA Polymerase E742F
atgagggggatgctgcccctctttgagcccaagggccgggtcctcctggtggacggccaccacctggcctaccgcaccttccacgccctgaagggcctcaccaccagccggggggagccggtgcaggcggtctacggcttcgccaagagcctcctcaaggccctcaaggaggacggggacgcggtgatcgtggtctttgacgccaaggccccctccttccgccacgaggcctacggggggtacaaggcgggccgggcccccacgccggaggactttccccggcaactcgccctcatcaaggagctggtggacctcctggggctggcgcgcctcgaggtcccgggctacgaggcggacgacgtcctggccagcctggccaagaaggcggaaaaggagggctacgaggtccgcatcctcaccgccgacaaagacctttaccagctcctttccgaccgcatccacgccctccaccccgaggggtacctcatcaccccggcctggctttgggaaaagtacggcctgaggcccgaccagtgggccgactaccgggccctgaccggggacgagtccgacaaccttcccggggtcaagggcatcggggagaagacggcgaggaagcttctggaggagtgggggagcctggaagccctcctcaagaacctggaccggctgaagcccgccatccgggagaagatcctggcccacatggacgatctgaagctctcctgggacctggccaaggtgcgcaccgacctgcccctggaggtggacttcgccaaaaggcgggagcccgaccgggagaggcttagggcctttctggagaggcttgagtttggcagcctcctccacgagttcggccttctggaaagccccaaggccctggaggaggccccctggcccccgccggaaggggccttcgtgggctttgtgctttcccgcaaggagcccatgtgggccgatcttctggccctggccgccgccagggggggccgggtccaccgggcccccgagccttataaagccctcagggacctgaaggaggcgcgggggcttctcgccaaagacctgagcgttctggccctgagggaaggccttggcctcccgcccggcgacgaccccatgctcctcgcctacctcctggacccttccaacaccacccccgagggggtggcccggcgctacggcggggagtggacggaggaggcgggggagcgggccgccctttccgagaggctcttcgccaacctgtgggggaggcttgagggggaggagaggctcctttggctttaccgggaggtggagaggcccctttccgctgtcctggcccacatggaggccacgggggtgcgcctggacgtggcctatctcagggccttgtccctggaggtggccgaggagatcgcccgcctcgaggccgaggtcttccgcctggccggccaccccttcaacctcaactcccgggaccagctggaaagggtcctctttgacgagctagggcttcccgccatcggcaagacggagaagaccggcaagcgctccaccagcgccgccgtcctggaggccctccgcgaggcccaccccatcgtggagaagatcctgcagtaccgggagctcaccaagctgaagagcacctacattgaccccttgccggacctcatccaccccaggacgggccgcctccacacccgcttcaaccagacggccacggccacgggcaggctaagtagctccgatcccaacctccagaacatccccgtccgcaccccgcttgggcagaggatccgccgggccttcatcgccgaggaggggtggctattggtggccctggactatagccagatagagctcagggtgctggcccacctctccggcgacgagaacctgatccgggtcttccaggaggggcgggacatccacacggagaccgccagctggatgttcggcgtcccccgggaggccgtggaccccctgatgcgccgggcggccaagaccatcaacttcggggtcctctacggcatgtcggcccaccgcctctcccaggagctagccatcccttacgaggaggcccaggccttcattgagcgctactttcagagcttccccaaggtgcgggcctggattgagaagaccctggaggagggcaggaggcgggggtacgtggagaccctcttcggccgccgccgctacgtgccagacctagaggcccgggtgaagagcgtgcggtttgcggccgagcgcatggccttcaacatgcccgtccagggcaccgccgccgacctcatgaagctggctatggtgaagctcttccccaggctggaggaaatgggggccaggatgctccttcaggtccacgacgagctggtcctcgaggccccaaaagagagggcggaggccgtggcccggctggccaaggaggtcatggagggggtgtatcccctggccgtgcccctggaggtggaggtggggataggggaggactggctctccgccaaggagtgataccaccccatgctggcccaagccagcatgggggccccggcaaaaggtttctggggaagttaccaggcatggtgggccgaaggaaacaggaaacaagggtatgagggttttttgccctaaagaaaggccagggggtcctcccgaaggaaggcttccagggggataccccctgggcccaggagtagcccctttcctccaaaggcctgggtgaaggcttttagccctttggtcctttgggaaggggcgcttttgacctccaaagccagaaggcgccttcccttcttcaagacgaagtcaacctcctggtccctttcccgccagtagtacacctcaaagcccccgtgggggccgtgggccagaaggtgggcgcccacggcggtttccacgagccgccccatgagggcggcgtccgcccacacctcctttggggaaagccccaagaccgccgtgatgagccccgtattaagggccaggagcttggggctcgaggcgcggcgccggaagggctcggcggcgtacttctgcag

SEQ ID NO: 3461 - DNA, 3026 bp, Artificial Sequence
  Description of Artificial Sequence: Synthetic DNA sequence of Thermus aquaticus DNA Polymerase E742S
atgagggggatgctgcccctctttgagcccaagggccgggtcctcctggtggacggccaccacctggcctaccgcaccttccacgccctgaagggcctcaccaccagccggggggagccggtgcaggcggtctacggcttcgccaagagcctcctcaaggccctcaaggaggacggggacgcggtgatcgtggtctttgacgccaaggccccctccttccgccacgaggcctacggggggtacaaggcgggccgggcccccacgccggaggactttccccggcaactcgccctcatcaaggagctggtggacctcctggggctggcgcgcctcgaggtcccgggctacgaggcggacgacgtcctggccagcctggccaagaaggcggaaaaggagggctacgaggtccgcatcctcaccgccgacaaagacctttaccagctcctttccgaccgcatccacgccctccaccccgaggggtacctcatcaccccggcctggctttgggaaaagtacggcctgaggcccgaccagtgggccgactaccgggccctgaccggggacgagtccgacaaccttcccggggtcaagggcatcggggagaagacggcgaggaagcttctggaggagtgggggagcctggaagccctcctcaagaacctggaccggctgaagcccgccatccgggagaagatcctggcccacatggacgatctgaagctctcctgggacctggccaaggtgcgcaccgacctgcccctggaggtggacttcgccaaaaggcgggagcccgaccgggagaggcttagggcctttctggagaggcttgagtttggcagcctcctccacgagttcggccttctggaaagccccaaggccctggaggaggccccctggcccccgccggaaggggccttcgtgggctttgtgctttcccgcaaggagcccatgtgggccgatcttctggccctggccgccgccagggggggccgggtccaccgggcccccgagccttataaagccctcagggacctgaaggaggcgcgggggcttctcgccaaagacctgagcgttctggccctgagggaaggccttggcctcccgcccggcgacgaccccatgctcctcgcctacctcctggacccttccaacaccacccccgagggggtggcccggcgctacggcggggagtggacggaggaggcgggggagcgggccgccctttccgagaggctcttcgccaacctgtgggggaggcttgagggggaggagaggctcctttggctttaccgggaggtggagaggcccctttccgctgtcctggcccacatggaggccacgggggtgcgcctggacgtggcctatctcagggccttgtccctggaggtggccgaggagatcgcccgcctcgaggccgaggtcttccgcctggccggccaccccttcaacctcaactcccgggaccagctggaaagggtcctctttgacgagctagggcttcccgccatcggcaagacggagaagaccggcaagcgctccaccagcgccgccgtcctggaggccctccgcgaggcccaccccatcgtggagaagatcctgcagtaccgggagctcaccaagctgaagagcacctacattgaccccttgccggacctcatccaccccaggacgggccgcctccacacccgcttcaaccagacggccacggccacgggcaggctaagtagctccgatcccaacctccagaacatccccgtccgcaccccgcttgggcagaggatccgccgggccttcatcgccgaggaggggtggctattggtggccctggactatagccagatagagctcagggtgctggcccacctctccggcgacgagaacctgatccgggtcttccaggaggggcgggacatccacacggagaccgccagctggatgttcggcgtcccccgggaggccgtggaccccctgatgcgccgggcggccaagaccatcaacttcggggtcctctacggcatgtcggcccaccgcctctcccaggagctagccatcccttacgaggaggcccaggccttcattgagcgctactttcagagcttccccaaggtgcgggcctggattgagaagaccctggaggagggcaggaggcgggggtacgtggagaccctcttcggccgccgccgctacgtgccagacctagaggcccgggtgaagagcgtgcggtctgcggccgagcgcatggccttcaacatgcccgtccagggcaccgccgccgacctcatgaagctggctatggtgaagctcttccccaggctggaggaaatgggggccaggatgctccttcaggtccacgacgagctggtcctcgaggccccaaaagagagggcggaggccgtggcccggctggccaaggaggtcatggagggggtgtatcccctggccgtgcccctggaggtggaggtggggataggggaggactggctctccgccaaggagtgataccaccccatgctggcccaagccagcatgggggccccggcaaaaggtttctggggaagttaccaggcatggtgggccgaaggaaacaggaaacaagggtatgagggttttttgccctaaagaaaggccagggggtcctcccgaaggaaggcttccagggggataccccctgggcccaggagtagcccctttcctccaaaggcctgggtgaaggcttttagccctttggtcctttgggaaggggcgcttttgacctccaaagccagaaggcgccttcccttcttcaagacgaagtcaacctcctggtccctttcccgccagtagtacacctcaaagcccccgtgggggccgtgggccagaaggtgggcgcccacggcggtttccacgagccgccccatgagggcggcgtccgcccacacctcctttggggaaagccccaagaccgccgtgatgagccccgtattaagggccaggagcttggggctcgaggcgcggcgccggaagggctcggcggcgtacttctgcag

SEQ ID NO: 3462 - DNA, 3026 bp, Artificial Sequence
  Description of Artificial Sequence: Synthetic DNA sequence of Thermus aquaticus DNA Polymerase E742Y
atgagggggatgctgcccctctttgagcccaagggccgggtcctcctggtggacggccaccacctggcctaccgcaccttccacgccctgaagggcctcaccaccagccggggggagccggtgcaggcggtctacggcttcgccaagagcctcctcaaggccctcaaggaggacggggacgcggtgatcgtggtctttgacgccaaggccccctccttccgccacgaggcctacggggggtacaaggcgggccgggcccccacgccggaggactttccccggcaactcgccctcatcaaggagctggtggacctcctggggctggcgcgcctcgaggtcccgggctacgaggcggacgacgtcctggccagcctggccaagaaggcggaaaaggagggctacgaggtccgcatcctcaccgccgacaaagacctttaccagctcctttccgaccgcatccacgccctccaccccgaggggtacctcatcaccccggcctggctttgggaaaagtacggcctgaggcccgaccagtgggccgactaccgggccctgaccggggacgagtccgacaaccttcccggggtcaagggcatcggggagaagacggcgaggaagcttctggaggagtgggggagcctggaagccctcctcaagaacctggaccggctgaagcccgccatccgggagaagatcctggcccacatggacgatctgaagctctcctgggacctggccaaggtgcgcaccgacctgcccctggaggtggacttcgccaaaaggcgggagcccgaccgggagaggcttagggcctttctggagaggcttgagtttggcagcctcctccacgagttcggccttctggaaagccccaaggccctggaggaggccccctggcccccgccggaaggggccttcgtgggctttgtgctttcccgcaaggagcccatgtgggccgatcttctggccctggccgccgccagggggggccgggtccaccgggcccccgagccttataaagccctcagggacctgaaggaggcgcgggggcttctcgccaaagacctgagcgttctggccctgagggaaggccttggcctcccgcccggcgacgaccccatgctcctcgcctacctcctggacccttccaacaccacccccgagggggtggcccggcgctacggcggggagtggacggaggaggcgggggagcgggccgccctttccgagaggctcttcgccaacctgtgggggaggcttgagggggaggagaggctcctttggctttaccgggaggtggagaggcccctttccgctgtcctggcccacatggaggccacgggggtgcgcctggacgtggcctatctcagggccttgtccctggaggtggccgaggagatcgcccgcctcgaggccgaggtcttccgcctggccggccaccccttcaacctcaactcccgggaccagctggaaagggtcctctttgacgagctagggcttcccgccatcggcaagacggagaagaccggcaagcgctccaccagcgccgccgtcctggaggccctccgcgaggcccaccccatcgtggagaagatcctgcagtaccgggagctcaccaagctgaagagcacctacattgaccccttgccggacctcatccaccccaggacgggccgcctccacacccgcttcaaccagacggccacggccacgggcaggctaagtagctccgatcccaacctccagaacatccccgtccgcaccccgcttgggcagaggatccgccgggccttcatcgccgaggaggggtggctattggtggccctggactatagccagatagagctcagggtgctggcccacctctccggcgacgagaacctgatccgggtcttccaggaggggcgggacatccacacggagaccgccagctggatgttcggcgtcccccgggaggccgtggaccccctgatgcgccgggcggccaagaccatcaacttcggggtcctctacggcatgtcggcccaccgcctctcccaggagctagccatcccttacgaggaggcccaggccttcattgagcgctactttcagagcttccccaaggtgcgggcctggattgagaagaccctggaggagggcaggaggcgggggtacgtggagaccctcttcggccgccgccgctacgtgccagacctagaggcccgggtgaagagcgtgcggtatgcggccgagcgcatggccttcaacatgcccgtccagggcaccgccgccgacctcatgaagctggctatggtgaagctcttccccaggctggaggaaatgggggccaggatgctccttcaggtccacgacgagctggtcctcgaggccccaaaagagagggcggaggccgtggcccggctggccaaggaggtcatggagggggtgtatcccctggccgtgcccctggaggtggaggtggggataggggaggactggctctccgccaaggagtgataccaccccatgctggcccaagccagcatgggggccccggcaaaaggtttctggggaagttaccaggcatggtgggccgaaggaaacaggaaacaagggtatgagggttttttgccctaaagaaaggccagggggtcctcccgaaggaaggcttccagggggataccccctgggcccaggagtagcccctttcctccaaaggcctgggtgaaggcttttagccctttggtcctttgggaaggggcgcttttgacctccaaagccagaaggcgccttcccttcttcaagacgaagtcaacctcctggtccctttcccgccagtagtacacctcaaagcccccgtgggggccgtgggccagaaggtgggcgcccacggcggtttccacgagccgccccatgagggcggcgtccgcccacacctcctttggggaaagccccaagaccgccgtgatgagccccgtattaagggccaggagcttggggctcgaggcgcggcgccggaagggctcggcggcgtacttctgcag

SEQ ID NO: 3463 - DNA, 3026 bp, Artificial Sequence
  Description of Artificial Sequence: Synthetic DNA sequence of Thermus aquaticus DNA Polymerase E742W
atgagggggatgctgcccctctttgagcccaagggccgggtcctcctggtggacggccaccacctggcctaccgcaccttccacgccctgaagggcctcaccaccagccggggggagccggtgcaggcggtctacggcttcgccaagagcctcctcaaggccctcaaggaggacggggacgcggtgatcgtggtctttgacgccaaggccccctccttccgccacgaggcctacggggggtacaaggcgggccgggcccccacgccggaggactttccccggcaactcgccctcatcaaggagctggtggacctcctggggctggcgcgcctcgaggtcccgggctacgaggcggacgacgtcctggccagcctggccaagaaggcggaaaaggagggctacgaggtccgcatcctcaccgccgacaaagacctttaccagctcctttccgaccgcatccacgccctccaccccgaggggtacctcatcaccccggcctggctttgggaaaagtacggcctgaggcccgaccagtgggccgactaccgggccctgaccggggacgagtccgacaaccttcccggggtcaagggcatcggggagaagacggcgaggaagcttctggaggagtgggggagcctggaagccctcctcaagaacctggaccggctgaagcccgccatccgggagaagatcctggcccacatggacgatctgaagctctcctgggacctggccaaggtgcgcaccgacctgcccctggaggtggacttcgccaaaaggcgggagcccgaccgggagaggcttagggcctttctggagaggcttgagtttggcagcctcctccacgagttcggccttctggaaagccccaaggccctggaggaggccccctggcccccgccggaaggggccttcgtgggctttgtgctttcccgcaaggagcccatgtgggccgatcttctggccctggccgccgccagggggggccgggtccaccgggcccccgagccttataaagccctcagggacctgaaggaggcgcgggggcttctcgccaaagacctgagcgttctggccctgagggaaggccttggcctcccgcccggcgacgaccccatgctcctcgcctacctcctggacccttccaacaccacccccgagggggtggcccggcgctacggcggggagtggacggaggaggcgggggagcgggccgccctttccgagaggctcttcgccaacctgtgggggaggcttgagggggaggagaggctcctttggctttaccgggaggtggagaggcccctttccgctgtcctggcccacatggaggccacgggggtgcgcctggacgtggcctatctcagggccttgtccctggaggtggccgaggagatcgcccgcctcgaggccgaggtcttccgcctggccggccaccccttcaacctcaactcccgggaccagctggaaagggtcctctttgacgagctagggcttcccgccatcggcaagacggagaagaccggcaagcgctccaccagcgccgccgtcctggaggccctccgcgaggcccaccccatcgtggagaagatcctgcagtaccgggagctcaccaagctgaagagcacctacattgaccccttgccggacctcatccaccccaggacgggccgcctccacacccgcttcaaccagacggccacggccacgggcaggctaagtagctccgatcccaacctccagaacatccccgtccgcaccccgcttgggcagaggatccgccgggccttcatcgccgaggaggggtggctattggtggccctggactatagccagatagagctcagggtgctggcccacctctccggcgacgagaacctgatccgggtcttccaggaggggcgggacatccacacggagaccgccagctggatgttcggcgtcccccgggaggccgtggaccccctgatgcgccgggcggccaagaccatcaacttcggggtcctctacggcatgtcggcccaccgcctctcccaggagctagccatcccttacgaggaggcccaggccttcattgagcgctactttcagagcttccccaaggtgcgggcctggattgagaagaccctggaggagggcaggaggcgggggtacgtggagaccctcttcggccgccgccgctacgtgccagacctagaggcccgggtgaagagcgtgcggtgggcggccgagcgcatggccttcaacatgcccgtccagggcaccgccgccgacctcatgaagctggctatggtgaagctcttccccaggctggaggaaatgggggccaggatgctccttcaggtccacgacgagctggtcctcgaggccccaaaagagagggcggaggccgtggcccggctggccaaggaggtcatggagggggtgtatcccctggccgtgcccctggaggtggaggtggggataggggaggactggctctccgccaaggagtgataccaccccatgctggcccaagccagcatgggggccccggcaaaaggtttctggggaagttaccaggcatggtgggccgaaggaaacaggaaacaagggtatgagggttttttgccctaaagaaaggccagggggtcctcccgaaggaaggcttccagggggataccccctgggcccaggagtagcccctttcctccaaaggcctgggtgaaggcttttagccctttggtcctttgggaaggggcgcttttgacctccaaagccagaaggcgccttcccttcttcaagacgaagtcaacctcctggtccctttcccgccagtagtacacctcaaagcccccgtgggggccgtgggccagaaggtgggcgcccacggcggtttccacgagccgccccatgagggcggcgtccgcccacacctcctttggggaaagccccaagaccgccgtgatgagccccgtattaagggccaggagcttggggctcgaggcgcggcgccggaagggctcggcggcgtacttctgcag

SEQ ID NO: 3464 - DNA, 3026 bp, Artificial Sequence
  Description of Artificial Sequence: Synthetic DNA sequence of Thermus aquaticus DNA Polymerase E742P
atgagggggatgctgcccctctttgagcccaagggccgggtcctcctggtggacggccaccacctggcctaccgcaccttccacgccctgaagggcctcaccaccagccggggggagccggtgcaggcggtctacggcttcgccaagagcctcctcaaggccctcaaggaggacggggacgcggtgatcgtggtctttgacgccaaggccccctccttccgccacgaggcctacggggggtacaaggcgggccgggcccccacgccggaggactttccccggcaactcgccctcatcaaggagctggtggacctcctggggctggcgcgcctcgaggtcccgggctacgaggcggacgacgtcctggccagcctggccaagaaggcggaaaaggagggctacgaggtccgcatcctcaccgccgacaaagacctttaccagctcctttccgaccgcatccacgccctccaccccgaggggtacctcatcaccccggcctggctttgggaaaagtacggcctgaggcccgaccagtgggccgactaccgggccctgaccggggacgagtccgacaaccttcccggggtcaagggcatcggggagaagacggcgaggaagcttctggaggagtgggggagcctggaagccctcctcaagaacctggaccggctgaagcccgccatccgggagaagatcctggcccacatggacgatctgaagctctcctgggacctggccaaggtgcgcaccgacctgcccctggaggtggacttcgccaaaaggcgggagcccgaccgggagaggcttagggcctttctggagaggcttgagtttggcagcctcctccacgagttcggccttctggaaagccccaaggccctggaggaggccccctggcccccgccggaaggggccttcgtgggctttgtgctttcccgcaaggagcccatgtgggccgatcttctggccctggccgccgccagggggggccgggtccaccgggcccccgagccttataaagccctcagggacctgaaggaggcgcgggggcttctcgccaaagacctgagcgttctggccctgagggaaggccttggcctcccgcccggcgacgaccccatgctcctcgcctacctcctggacccttccaacaccacccccgagggggtggcccggcgctacggcggggagtggacggaggaggcgggggagcgggccgccctttccgagaggctcttcgccaacctgtgggggaggcttgagggggaggagaggctcctttggctttaccgggaggtggagaggcccctttccgctgtcctggcccacatggaggccacgggggtgcgcctggacgtggcctatctcagggccttgtccctggaggtggccgaggagatcgcccgcctcgaggccgaggtcttccgcctggccggccaccccttcaacctcaactcccgggaccagctggaaagggtcctctttgacgagctagggcttcccgccatcggcaagacggagaagaccggcaagcgctccaccagcgccgccgtcctggaggccctccgcgaggcccaccccatcgtggagaagatcctgcagtaccgggagctcaccaagctgaagagcacctacattgaccccttgccggacctcatccaccccaggacgggccgcctccacacccgcttcaaccagacggccacggccacgggcaggctaagtagctccgatcccaacctccagaacatccccgtccgcaccccgcttgggcagaggatccgccgggccttcatcgccgaggaggggtggctattggtggccctggactatagccagatagagctcagggtgctggcccacctctccggcgacgagaacctgatccgggtcttccaggaggggcgggacatccacacggagaccgccagctggatgttcggcgtcccccgggaggccgtggaccccctgatgcgccgggcggccaagaccatcaacttcggggtcctctacggcatgtcggcccaccgcctctcccaggagctagccatcccttacgaggaggcccaggccttcattgagcgctactttcagagcttccccaaggtgcgggcctggattgagaagaccctggaggagggcaggaggcgggggtacgtggagaccctcttcggccgccgccgctacgtgccagacctagaggcccgggtgaagagcgtgcggcctgcggccgagcgcatggccttcaacatgcccgtccagggcaccgccgccgacctcatgaagctggctatggtgaagctcttccccaggctggaggaaatgggggccaggatgctccttcaggtccacgacgagctggtcctcgaggccccaaaagagagggcggaggccgtggcccggctggccaaggaggtcatggagggggtgtatcccctggccgtgcccctggaggtggaggtggggataggggaggactggctctccgccaaggagtgataccaccccatgctggcccaagccagcatgggggccccggcaaaaggtttctggggaagttaccaggcatggtgggccgaaggaaacaggaaacaagggtatgagggttttttgccctaaagaaaggccagggggtcctcccgaaggaaggcttccagggggataccccctgggcccaggagtagcccctttcctccaaaggcctgggtgaaggcttttagccctttggtcctttgggaaggggcgcttttgacctccaaagccagaaggcgccttcccttcttcaagacgaagtcaacctcctggtccctttcccgccagtagtacacctcaaagcccccgtgggggccgtgggccagaaggtgggcgcccacggcggtttccacgagccgccccatgagggcggcgtccgcccacacctcctttggggaaagccccaagaccgccgtgatgagccccgtattaagggccaggagcttggggctcgaggcgcggcgccggaagggctcggcggcgtacttctgcag

SEQ ID NO: 3465 - DNA, 3026 bp, Artificial Sequence
  Description of Artificial Sequence: Synthetic DNA sequence of Thermus aquaticus DNA Polymerase E742M
atgagggggatgctgcccctctttgagcccaagggccgggtcctcctggtggacggccaccacctggcctaccgcaccttccacgccctgaagggcctcaccaccagccggggggagccggtgcaggcggtctacggcttcgccaagagcctcctcaaggccctcaaggaggacggggacgcggtgatcgtggtctttgacgccaaggccccctccttccgccacgaggcctacggggggtacaaggcgggccgggcccccacgccggaggactttccccggcaactcgccctcatcaaggagctggtggacctcctggggctggcgcgcctcgaggtcccgggctacgaggcggacgacgtcctggccagcctggccaagaaggcggaaaaggagggctacgaggtccgcatcctcaccgccgacaaagacctttaccagctcctttccgaccgcatccacgccctccaccccgaggggtacctcatcaccccggcctggctttgggaaaagtacggcctgaggcccgaccagtgggccgactaccgggccctgaccggggacgagtccgacaaccttcccggggtcaagggcatcggggagaagacggcgaggaagcttctggaggagtgggggagcctggaagccctcctcaagaacctggaccggctgaagcccgccatccgggagaagatcctggcccacatggacgatctgaagctctcctgggacctggccaaggtgcgcaccgacctgcccctggaggtggacttcgccaaaaggcgggagcccgaccgggagaggcttagggcctttctggagaggcttgagtttggcagcctcctccacgagttcggccttctggaaagccccaaggccctggaggaggccccctggcccccgccggaaggggccttcgtgggctttgtgctttcccgcaaggagcccatgtgggccgatcttctggccctggccgccgccagggggggccgggtccaccgggcccccgagccttataaagccctcagggacctgaaggaggcgcgggggcttctcgccaaagacctgagcgttctggccctgagggaaggccttggcctcccgcccggcgacgaccccatgctcctcgcctacctcctggacccttccaacaccacccccgagggggtggcccggcgctacggcggggagtggacggaggaggcgggggagcgggccgccctttccgagaggctcttcgccaacctgtgggggaggcttgagggggaggagaggctcctttggctttaccgggaggtggagaggcccctttccgctgtcctggcccacatggaggccacgggggtgcgcctggacgtggcctatctcagggccttgtccctggaggtggccgaggagatcgcccgcctcgaggccgaggtcttccgcctggccggccaccccttcaacctcaactcccgggaccagctggaaagggtcctctttgacgagctagggcttcccgccatcggcaagacggagaagaccggcaagcgctccaccagcgccgccgtcctggaggccctccgcgaggcccaccccatcgtggagaagatcctgcagtaccgggagctcaccaagctgaagagcacctacattgaccccttgccggacctcatccaccccaggacgggccgcctccacacccgcttcaaccagacggccacggccacgggcaggctaagtagctccgatcccaacctccagaacatccccgtccgcaccccgcttgggcagaggatccgccgggccttcatcgccgaggaggggtggctattggtggccctggactatagccagatagagctcagggtgctggcccacctctccggcgacgagaacctgatccgggtcttccaggaggggcgggacatccacacggagaccgccagctggatgttcggcgtcccccgggaggccgtggaccccctgatgcgccgggcggccaagaccatcaacttcggggtcctctacggcatgtcggcccaccgcctctcccaggagctagccatcccttacgaggaggcccaggccttcattgagcgctactttcagagcttccccaaggtgcgggcctggattgagaagaccctggaggagggcaggaggcgggggtacgtggagaccctcttcggccgccgccgctacgtgccagacctagaggcccgggtgaagagcgtgcggatggcggccgagcgcatggccttcaacatgcccgtccagggcaccgccgccgacctcatgaagctggctatggtgaagctcttccccaggctggaggaaatgggggccaggatgctccttcaggtccacgacgagctggtcctcgaggccccaaaagagagggcggaggccgtggcccggctggccaaggaggtcatggagggggtgtatcccctggccgtgcccctggaggtggaggtggggataggggaggactggctctccgccaaggagtgataccaccccatgctggcccaagccagcatgggggccccggcaaaaggtttctggggaagttaccaggcatggtgggccgaaggaaacaggaaacaagggtatgagggttttttgccctaaagaaaggccagggggtcctcccgaaggaaggcttccagggggataccccctgggcccaggagtagcccctttcctccaaaggcctgggtgaaggcttttagccctttggtcctttgggaaggggcgcttttgacctccaaagccagaaggcgccttcccttcttcaagacgaagtcaacctcctggtccctttcccgccagtagtacacctcaaagcccccgtgggggccgtgggccagaaggtgggcgcccacggcggtttccacgagccgccccatgagggcggcgtccgcccacacctcctttggggaaagccccaagaccgccgtgatgagccccgtattaagggccaggagcttggggctcgaggcgcggcgccggaagggctcggcggcgtacttctgcag

SEQ ID NO: 3466 - DNA, 3026 bp, Artificial Sequence
  Description of Artificial Sequence: Synthetic DNA sequence of Thermus aquaticus DNA Polymerase E742T
atgagggggatgctgcccctctttgagcccaagggccgggtcctcctggtggacggccaccacctggcctaccgcaccttccacgccctgaagggcctcaccaccagccggggggagccggtgcaggcggtctacggcttcgccaagagcctcctcaaggccctcaaggaggacggggacgcggtgatcgtggtctttgacgccaaggccccctccttccgccacgaggcctacggggggtacaaggcgggccgggcccccacgccggaggactttccccggcaactcgccctcatcaaggagctggtggacctcctggggctggcgcgcctcgaggtcccgggctacgaggcggacgacgtcctggccagcctggccaagaaggcggaaaaggagggctacgaggtccgcatcctcaccgccgacaaagacctttaccagctcctttccgaccgcatccacgccctccaccccgaggggtacctcatcaccccggcctggctttgggaaaagtacggcctgaggcccgaccagtgggccgactaccgggccctgaccggggacgagtccgacaaccttcccggggtcaagggcatcggggagaagacggcgaggaagcttctggaggagtgggggagcctggaagccctcctcaagaacctggaccggctgaagcccgccatccgggagaagatcctggcccacatggacgatctgaagctctcctgggacctggccaaggtgcgcaccgacctgcccctggaggtggacttcgccaaaaggcgggagcccgaccgggagaggcttagggcctttctggagaggcttgagtttggcagcctcctccacgagttcggccttctggaaagccccaaggccctggaggaggccccctggcccccgccggaaggggccttcgtgggctttgtgctttcccgcaaggagcccatgtgggccgatcttctggccctggccgccgccagggggggccgggtccaccgggcccccgagccttataaagccctcagggacctgaaggaggcgcgggggcttctcgccaaagacctgagcgttctggccctgagggaaggccttggcctcccgcccggcgacgaccccatgctcctcgcctacctcctggacccttccaacaccacccccgagggggtggcccggcgctacggcggggagtggacggaggaggcgggggagcgggccgccctttccgagaggctcttcgccaacctgtgggggaggcttgagggggaggagaggctcctttggctttaccgggaggtggagaggcccctttccgctgtcctggcccacatggaggccacgggggtgcgcctggacgtggcctatctcagggccttgtccctggaggtggccgaggagatcgcccgcctcgaggccgaggtcttccgcctggccggccaccccttcaacctcaactcccgggaccagctggaaagggtcctctttgacgagctagggcttcccgccatcggcaagacggagaagaccggcaagcgctccaccagcgccgccgtcctggaggccctccgcgaggcccaccccatcgtggagaagatcctgcagtaccgggagctcaccaagctgaagagcacctacattgaccccttgccggacctcatccaccccaggacgggccgcctccacacccgcttcaaccagacggccacggccacgggcaggctaagtagctccgatcccaacctccagaacatccccgtccgcaccccgcttgggcagaggatccgccgggccttcatcgccgaggaggggtggctattggtggccctggactatagccagatagagctcagggtgctggcccacctctccggcgacgagaacctgatccgggtcttccaggaggggcgggacatccacacggagaccgccagctggatgttcggcgtcccccgggaggccgtggaccccctgatgcgccgggcggccaagaccatcaacttcggggtcctctacggcatgtcggcccaccgcctctcccaggagctagccatcccttacgaggaggcccaggccttcattgagcgctactttcagagcttccccaaggtgcgggcctggattgagaagaccctggaggagggcaggaggcgggggtacgtggagaccctcttcggccgccgccgctacgtgccagacctagaggcccgggtgaagagcgtgcggactgcggccgagcgcatggccttcaacatgcccgtccagggcaccgccgccgacctcatgaagctggctatggtgaagctcttccccaggctggaggaaatgggggccaggatgctccttcaggtccacgacgagctggtcctcgaggccccaaaagagagggcggaggccgtggcccggctggccaaggaggtcatggagggggtgtatcccctggccgtgcccctggaggtggaggtggggataggggaggactggctctccgccaaggagtgataccaccccatgctggcccaagccagcatgggggccccggcaaaaggtttctggggaagttaccaggcatggtgggccgaaggaaacaggaaacaagggtatgagggttttttgccctaaagaaaggccagggggtcctcccgaaggaaggcttccagggggataccccctgggcccaggagtagcccctttcctccaaaggcctgggtgaaggcttttagccctttggtcctttgggaaggggcgcttttgacctccaaagccagaaggcgccttcccttcttcaagacgaagtcaacctcctggtccctttcccgccagtagtacacctcaaagcccccgtgggggccgtgggccagaaggtgggcgcccacggcggtttccacgagccgccccatgagggcggcgtccgcccacacctcctttggggaaagccccaagaccgccgtgatgagccccgtattaagggccaggagcttggggctcgaggcgcggcgccggaagggctcggcggcgtacttctgcag

SEQ ID NO: 3467 - DNA, 3026 bp, Artificial Sequence
  Description of Artificial Sequence: Synthetic DNA sequence of Thermus aquaticus DNA Polymerase E742N
atgagggggatgctgcccctctttgagcccaagggccgggtcctcctggtggacggccaccacctggcctaccgcaccttccacgccctgaagggcctcaccaccagccggggggagccggtgcaggcggtctacggcttcgccaagagcctcctcaaggccctcaaggaggacggggacgcggtgatcgtggtctttgacgccaaggccccctccttccgccacgaggcctacggggggtacaaggcgggccgggcccccacgccggaggactttccccggcaactcgccctcatcaaggagctggtggacctcctggggctggcgcgcctcgaggtcccgggctacgaggcggacgacgtcctggccagcctggccaagaaggcggaaaaggagggctacgaggtccgcatcctcaccgccgacaaagacctttaccagctcctttccgaccgcatccacgccctccaccccgaggggtacctcatcaccccggcctggctttgggaaaagtacggcctgaggcccgaccagtgggccgactaccgggccctgaccggggacgagtccgacaaccttcccggggtcaagggcatcggggagaagacggcgaggaagcttctggaggagtgggggagcctggaagccctcctcaagaacctggaccggctgaagcccgccatccgggagaagatcctggcccacatggacgatctgaagctctcctgggacctggccaaggtgcgcaccgacctgcccctggaggtggacttcgccaaaaggcgggagcccgaccgggagaggcttagggcctttctggagaggcttgagtttggcagcctcctccacgagttcggccttctggaaagccccaaggccctggaggaggccccctggcccccgccggaaggggccttcgtgggctttgtgctttcccgcaaggagcccatgtgggccgatcttctggccctggccgccgccagggggggccgggtccaccgggcccccgagccttataaagccctcagggacctgaaggaggcgcgggggcttctcgccaaagacctgagcgttctggccctgagggaaggccttggcctcccgcccggcgacgaccccatgctcctcgcctacctcctggacccttccaacaccacccccgagggggtggcccggcgctacggcggggagtggacggaggaggcgggggagcgggccgccctttccgagaggctcttcgccaacctgtgggggaggcttgagggggaggagaggctcctttggctttaccgggaggtggagaggcccctttccgctgtcctggcccacatggaggccacgggggtgcgcctggacgtggcctatctcagggccttgtccctggaggtggccgaggagatcgcccgcctcgaggccgaggtcttccgcctggccggccaccccttcaacctcaactcccgggaccagctggaaagggtcctctttgacgagctagggcttcccgccatcggcaagacggagaagaccggcaagcgctccaccagcgccgccgtcctggaggccctccgcgaggcccaccccatcgtggagaagatcctgcagtaccgggagctcaccaagctgaagagcacctacattgaccccttgccggacctcatccaccccaggacgggccgcctccacacccgcttcaaccagacggccacggccacgggcaggctaagtagctccgatcccaacctccagaacatccccgtccgcaccccgcttgggcagaggatccgccgggccttcatcgccgaggaggggtggctattggtggccctggactatagccagatagagctcagggtgctggcccacctctccggcgacgagaacctgatccgggtcttccaggaggggcgggacatccacacggagaccgccagctggatgttcggcgtcccccgggaggccgtggaccccctgatgcgccgggcggccaagaccatcaacttcggggtcctctacggcatgtcggcccaccgcctctcccaggagctagccatcccttacgaggaggcccaggccttcattgagcgctactttcagagcttccccaaggtgcgggcctggattgagaagaccctggaggagggcaggaggcgggggtacgtggagaccctcttcggccgccgccgctacgtgccagacctagaggcccgggtgaagagcgtgcggaatgcggccgagcgcatggccttcaacatgcccgtccagggcaccgccgccgacctcatgaagctggctatggtgaagctcttccccaggctggaggaaatgggggccaggatgctccttcaggtccacgacgagctggtcctcgaggccccaaaagagagggcggaggccgtggcccggctggccaaggaggtcatggagggggtgtatcccctggccgtgcccctggaggtggaggtggggataggggaggactggctctccgccaaggagtgataccaccccatgctggcccaagccagcatgggggccccggcaaaaggtttctggggaagttaccaggcatggtgggccgaaggaaacaggaaacaagggtatgagggttttttgccctaaagaaaggccagggggtcctcccgaaggaaggcttccagggggataccccctgggcccaggagtagcccctttcctccaaaggcctgggtgaaggcttttagccctttggtcctttgggaaggggcgcttttgacctccaaagccagaaggcgccttcccttcttcaagacgaagtcaacctcctggtccctttcccgccagtagtacacctcaaagcccccgtgggggccgtgggccagaaggtgggcgcccacggcggtttccacgagccgccccatgagggcggcgtccgcccacacctcctttggggaaagccccaagaccgccgtgatgagccccgtattaagggccaggagcttggggctcgaggcgcggcgccggaagggctcggcggcgtacttctgcag

SEQ ID NO: 3468 - DNA, 3026 bp, Artificial Sequence
  Description of Artificial Sequence: Synthetic DNA sequence of Thermus aquaticus DNA Polymerase E742V
atgagggggatgctgcccctctttgagcccaagggccgggtcctcctggtggacggccaccacctggcctaccgcaccttccacgccctgaagggcctcaccaccagccggggggagccggtgcaggcggtctacggcttcgccaagagcctcctcaaggccctcaaggaggacggggacgcggtgatcgtggtctttgacgccaaggccccctccttccgccacgaggcctacggggggtacaaggcgggccgggcccccacgccggaggactttccccggcaactcgccctcatcaaggagctggtggacctcctggggctggcgcgcctcgaggtcccgggctacgaggcggacgacgtcctggccagcctggccaagaaggcggaaaaggagggctacgaggtccgcatcctcaccgccgacaaagacctttaccagctcctttccgaccgcatccacgccctccaccccgaggggtacctcatcaccccggcctggctttgggaaaagtacggcctgaggcccgaccagtgggccgactaccgggccctgaccggggacgagtccgacaaccttcccggggtcaagggcatcggggagaagacggcgaggaagcttctggaggagtgggggagcctggaagccctcctcaagaacctggaccggctgaagcccgccatccgggagaagatcctggcccacatggacgatctgaagctctcctgggacctggccaaggtgcgcaccgacctgcccctggaggtggacttcgccaaaaggcgggagcccgaccgggagaggcttagggcctttctggagaggcttgagtttggcagcctcctccacgagttcggccttctggaaagccccaaggccctggaggaggccccctggcccccgccggaaggggccttcgtgggctttgtgctttcccgcaaggagcccatgtgggccgatcttctggccctggccgccgccagggggggccgggtccaccgggcccccgagccttataaagccctcagggacctgaaggaggcgcgggggcttctcgccaaagacctgagcgttctggccctgagggaaggccttggcctcccgcccggcgacgaccccatgctcctcgcctacctcctggacccttccaacaccacccccgagggggtggcccggcgctacggcggggagtggacggaggaggcgggggagcgggccgccctttccgagaggctcttcgccaacctgtgggggaggcttgagggggaggagaggctcctttggctttaccgggaggtggagaggcccctttccgctgtcctggcccacatggaggccacgggggtgcgcctggacgtggcctatctcagggccttgtccctggaggtggccgaggagatcgcccgcctcgaggccgaggtcttccgcctggccggccaccccttcaacctcaactcccgggaccagctggaaagggtcctctttgacgagctagggcttcccgccatcggcaagacggagaagaccggcaagcgctccaccagcgccgccgtcctggaggccctccgcgaggcccaccccatcgtggagaagatcctgcagtaccgggagctcaccaagctgaagagcacctacattgaccccttgccggacctcatccaccccaggacgggccgcctccacacccgcttcaaccagacggccacggccacgggcaggctaagtagctccgatcccaacctccagaacatccccgtccgcaccccgcttgggcagaggatccgccgggccttcatcgccgaggaggggtggctattggtggccctggactatagccagatagagctcagggtgctggcccacctctccggcgacgagaacctgatccgggtcttccaggaggggcgggacatccacacggagaccgccagctggatgttcggcgtcccccgggaggccgtggaccccctgatgcgccgggcggccaagaccatcaacttcggggtcctctacggcatgtcggcccaccgcctctcccaggagctagccatcccttacgaggaggcccaggccttcattgagcgctactttcagagcttccccaaggtgcgggcctggattgagaagaccctggaggagggcaggaggcgggggtacgtggagaccctcttcggccgccgccgctacgtgccagacctagaggcccgggtgaagagcgtgcgggtcgcggccgagcgcatggccttcaacatgcccgtccagggcaccgccgccgacctcatgaagctggctatggtgaagctcttccccaggctggaggaaatgggggccaggatgctccttcaggtccacgacgagctggtcctcgaggccccaaaagagagggcggaggccgtggcccggctggccaaggaggtcatggagggggtgtatcccctggccgtgcccctggaggtggaggtggggataggggaggactggctctccgccaaggagtgataccaccccatgctggcccaagccagcatgggggccccggcaaaaggtttctggggaagttaccaggcatggtgggccgaaggaaacaggaaacaagggtatgagggttttttgccctaaagaaaggccagggggtcctcccgaaggaaggcttccagggggataccccctgggcccaggagtagcccctttcctccaaaggcctgggtgaaggcttttagccctttggtcctttgggaaggggcgcttttgacctccaaagccagaaggcgccttcccttcttcaagacgaagtcaacctcctggtccctttcccgccagtagtacacctcaaagcccccgtgggggccgtgggccagaaggtgggcgcccacggcggtttccacgagccgccccatgagggcggcgtccgcccacacctcctttggggaaagccccaagaccgccgtgatgagccccgtattaagggccaggagcttggggctcgaggcgcggcgccggaagggctcggcggcgtacttctgcag

SEQ ID NO: 3469 - DNA, 3026 bp, Artificial Sequence
  Description of Artificial Sequence: Synthetic DNA sequence of Thermus aquaticus DNA Polymerase A743R
atgagggggatgctgcccctctttgagcccaagggccgggtcctcctggtggacggccaccacctggcctaccgcaccttccacgccctgaagggcctcaccaccagccggggggagccggtgcaggcggtctacggcttcgccaagagcctcctcaaggccctcaaggaggacggggacgcggtgatcgtggtctttgacgccaaggccccctccttccgccacgaggcctacggggggtacaaggcgggccgggcccccacgccggaggactttccccggcaactcgccctcatcaaggagctggtggacctcctggggctggcgcgcctcgaggtcccgggctacgaggcggacgacgtcctggccagcctggccaagaaggcggaaaaggagggctacgaggtccgcatcctcaccgccgacaaagacctttaccagctcctttccgaccgcatccacgccctccaccccgaggggtacctcatcaccccggcctggctttgggaaaagtacggcctgaggcccgaccagtgggccgactaccgggccctgaccggggacgagtccgacaaccttcccggggtcaagggcatcggggagaagacggcgaggaagcttctggaggagtgggggagcctggaagccctcctcaagaacctggaccggctgaagcccgccatccgggagaagatcctggcccacatggacgatctgaagctctcctgggacctggccaaggtgcgcaccgacctgcccctggaggtggacttcgccaaaaggcgggagcccgaccgggagaggcttagggcctttctggagaggcttgagtttggcagcctcctccacgagttcggccttctggaaagccccaaggccctggaggaggccccctggcccccgccggaaggggccttcgtgggctttgtgctttcccgcaaggagcccatgtgggccgatcttctggccctggccgccgccagggggggccgggtccaccgggcccccgagccttataaagccctcagggacctgaaggaggcgcgggggcttctcgccaaagacctgagcgttctggccctgagggaaggccttggcctcccgcccggcgacgaccccatgctcctcgcctacctcctggacccttccaacaccacccccgagggggtggcccggcgctacggcggggagtggacggaggaggcgggggagcgggccgccctttccgagaggctcttcgccaacctgtgggggaggcttgagggggaggagaggctcctttggctttaccgggaggtggagaggcccctttccgctgtcctggcccacatggaggccacgggggtgcgcctggacgtggcctatctcagggccttgtccctggaggtggccgaggagatcgcccgcctcgaggccgaggtcttccgcctggccggccaccccttcaacctcaactcccgggaccagctggaaagggtcctctttgacgagctagggcttcccgccatcggcaagacggagaagaccggcaagcgctccaccagcgccgccgtcctggaggccctccgcgaggcccaccccatcgtggagaagatcctgcagtaccgggagctcaccaagctgaagagcacctacattgaccccttgccggacctcatccaccccaggacgggccgcctccacacccgcttcaaccagacggccacggccacgggcaggctaagtagctccgatcccaacctccagaacatccccgtccgcaccccgcttgggcagaggatccgccgggccttcatcgccgaggaggggtggctattggtggccctggactatagccagatagagctcagggtgctggcccacctctccggcgacgagaacctgatccgggtcttccaggaggggcgggacatccacacggagaccgccagctggatgttcggcgtcccccgggaggccgtggaccccctgatgcgccgggcggccaagaccatcaacttcggggtcctctacggcatgtcggcccaccgcctctcccaggagctagccatcccttacgaggaggcccaggccttcattgagcgctactttcagagcttccccaaggtgcgggcctggattgagaagaccctggaggagggcaggaggcgggggtacgtggagaccctcttcggccgccgccgctacgtgccagacctagaggcccgggtgaagagcgtgcgggagcgagccgagcgcatggccttcaacatgcccgtccagggcaccgccgccgacctcatgaagctggctatggtgaagctcttccccaggctggaggaaatgggggccaggatgctccttcaggtccacgacgagctggtcctcgaggccccaaaagagagggcggaggccgtggcccggctggccaaggaggtcatggagggggtgtatcccctggccgtgcccctggaggtggaggtggggataggggaggactggctctccgccaaggagtgataccaccccatgctggcccaagccagcatgggggccccggcaaaaggtttctggggaagttaccaggcatggtgggccgaaggaaacaggaaacaagggtatgagggttttttgccctaaagaaaggccagggggtcctcccgaaggaaggcttccagggggataccccctgggcccaggagtagcccctttcctccaaaggcctgggtgaaggcttttagccctttggtcctttgggaaggggcgcttttgacctccaaagccagaaggcgccttcccttcttcaagacgaagtcaacctcctggtccctttcccgccagtagtacacctcaaagcccccgtgggggccgtgggccagaaggtgggcgcccacggcggtttccacgagccgccccatgagggcggcgtccgcccacacctcctttggggaaagccccaagaccgccgtgatgagccccgtattaagggccaggagcttggggctcgaggcgcggcgccggaagggctcggcggcgtacttctgcag

SEQ ID NO: 3470 - DNA, 3026 bp, Artificial Sequence
  Description of Artificial Sequence: Synthetic DNA sequence of Thermus aquaticus DNA Polymerase A743C
atgagggggatgctgcccctctttgagcccaagggccgggtcctcctggtggacggccaccacctggcctaccgcaccttccacgccctgaagggcctcaccaccagccggggggagccggtgcaggcggtctacggcttcgccaagagcctcctcaaggccctcaaggaggacggggacgcggtgatcgtggtctttgacgccaaggccccctccttccgccacgaggcctacggggggtacaaggcgggccgggcccccacgccggaggactttccccggcaactcgccctcatcaaggagctggtggacctcctggggctggcgcgcctcgaggtcccgggctacgaggcggacgacgtcctggccagcctggccaagaaggcggaaaaggagggctacgaggtccgcatcctcaccgccgacaaagacctttaccagctcctttccgaccgcatccacgccctccaccccgaggggtacctcatcaccccggcctggctttgggaaaagtacggcctgaggcccgaccagtgggccgactaccgggccctgaccggggacgagtccgacaaccttcccggggtcaagggcatcggggagaagacggcgaggaagcttctggaggagtgggggagcctggaagccctcctcaagaacctggaccggctgaagcccgccatccgggagaagatcctggcccacatggacgatctgaagctctcctgggacctggccaaggtgcgcaccgacctgcccctggaggtggacttcgccaaaaggcgggagcccgaccgggagaggcttagggcctttctggagaggcttgagtttggcagcctcctccacgagttcggccttctggaaagccccaaggccctggaggaggccccctggcccccgccggaaggggccttcgtgggctttgtgctttcccgcaaggagcccatgtgggccgatcttctggccctggccgccgccagggggggccgggtccaccgggcccccgagccttataaagccctcagggacctgaaggaggcgcgggggcttctcgccaaagacctgagcgttctggccctgagggaaggccttggcctcccgcccggcgacgaccccatgctcctcgcctacctcctggacccttccaacaccacccccgagggggtggcccggcgctacggcggggagtggacggaggaggcgggggagcgggccgccctttccgagaggctcttcgccaacctgtgggggaggcttgagggggaggagaggctcctttggctttaccgggaggtggagaggcccctttccgctgtcctggcccacatggaggccacgggggtgcgcctggacgtggcctatctcagggccttgtccctggaggtggccgaggagatcgcccgcctcgaggccgaggtcttccgcctggccggccaccccttcaacctcaactcccgggaccagctggaaagggtcctctttgacgagctagggcttcccgccatcggcaagacggagaagaccggcaagcgctccaccagcgccgccgtcctggaggccctccgcgaggcccaccccatcgtggagaagatcctgcagtaccgggagctcaccaagctgaagagcacctacattgaccccttgccggacctcatccaccccaggacgggccgcctccacacccgcttcaaccagacggccacggccacgggcaggctaagtagctccgatcccaacctccagaacatccccgtccgcaccccgcttgggcagaggatccgccgggccttcatcgccgaggaggggtggctattggtggccctggactatagccagatagagctcagggtgctggcccacctctccggcgacgagaacctgatccgggtcttccaggaggggcgggacatccacacggagaccgccagctggatgttcggcgtcccccgggaggccgtggaccccctgatgcgccgggcggccaagaccatcaacttcggggtcctctacggcatgtcggcccaccgcctctcccaggagctagccatcccttacgaggaggcccaggccttcattgagcgctactttcagagcttccccaaggtgcgggcctggattgagaagaccctggaggagggcaggaggcgggggtacgtggagaccctcttcggccgccgccgctacgtgccagacctagaggcccgggtgaagagcgtgcgggagtgtgccgagcgcatggccttcaacatgcccgtccagggcaccgccgccgacctcatgaagctggctatggtgaagctcttccccaggctggaggaaatgggggccaggatgctccttcaggtccacgacgagctggtcctcgaggccccaaaagagagggcggaggccgtggcccggctggccaaggaggtcatggagggggtgtatcccctggccgtgcccctggaggtggaggtggggataggggaggactggctctccgccaaggagtgataccaccccatgctggcccaagccagcatgggggccccggcaaaaggtttctggggaagttaccaggcatggtgggccgaaggaaacaggaaacaagggtatgagggttttttgccctaaagaaaggccagggggtcctcccgaaggaaggcttccagggggataccccctgggcccaggagtagcccctttcctccaaaggcctgggtgaaggcttttagccctttggtcctttgggaaggggcgcttttgacctccaaagccagaaggcgccttcccttcttcaagacgaagtcaacctcctggtccctttcccgccagtagtacacctcaaagcccccgtgggggccgtgggccagaaggtgggcgcccacggcggtttccacgagccgccccatgagggcggcgtccgcccacacctcctttggggaaagccccaagaccgccgtgatgagccccgtattaagggccaggagcttggggctcgaggcgcggcgccggaagggctcggcggcgtacttctgcag

SEQ ID NO: 3471 - DNA, 3026 bp, Artificial Sequence
  Description of Artificial Sequence: Synthetic DNA sequence of Thermus aquaticus DNA Polymerase A743G
atgagggggatgctgcccctctttgagcccaagggccgggtcctcctggtggacggccaccacctggcctaccgcaccttccacgccctgaagggcctcaccaccagccggggggagccggtgcaggcggtctacggcttcgccaagagcctcctcaaggccctcaaggaggacggggacgcggtgatcgtggtctttgacgccaaggccccctccttccgccacgaggcctacggggggtacaaggcgggccgggcccccacgccggaggactttccccggcaactcgccctcatcaaggagctggtggacctcctggggctggcgcgcctcgaggtcccgggctacgaggcggacgacgtcctggccagcctggccaagaaggcggaaaaggagggctacgaggtccgcatcctcaccgccgacaaagacctttaccagctcctttccgaccgcatccacgccctccaccccgaggggtacctcatcaccccggcctggctttgggaaaagtacggcctgaggcccgaccagtgggccgactaccgggccctgaccggggacgagtccgacaaccttcccggggtcaagggcatcggggagaagacggcgaggaagcttctggaggagtgggggagcctggaagccctcctcaagaacctggaccggctgaagcccgccatccgggagaagatcctggcccacatggacgatctgaagctctcctgggacctggccaaggtgcgcaccgacctgcccctggaggtggacttcgccaaaaggcgggagcccgaccgggagaggcttagggcctttctggagaggcttgagtttggcagcctcctccacgagttcggccttctggaaagccccaaggccctggaggaggccccctggcccccgccggaaggggccttcgtgggctttgtgctttcccgcaaggagcccatgtgggccgatcttctggccctggccgccgccagggggggccgggtccaccgggcccccgagccttataaagccctcagggacctgaaggaggcgcgggggcttctcgccaaagacctgagcgttctggccctgagggaaggccttggcctcccgcccggcgacgaccccatgctcctcgcctacctcctggacccttccaacaccacccccgagggggtggcccggcgctacggcggggagtggacggaggaggcgggggagcgggccgccctttccgagaggctcttcgccaacctgtgggggaggcttgagggggaggagaggctcctttggctttaccgggaggtggagaggcccctttccgctgtcctggcccacatggaggccacgggggtgcgcctggacgtggcctatctcagggccttgtccctggaggtggccgaggagatcgcccgcctcgaggccgaggtcttccgcctggccggccaccccttcaacctcaactcccgggaccagctggaaagggtcctctttgacgagctagggcttcccgccatcggcaagacggagaagaccggcaagcgctccaccagcgccgccgtcctggaggccctccgcgaggcccaccccatcgtggagaagatcctgcagtaccgggagctcaccaagctgaagagcacctacattgaccccttgccggacctcatccaccccaggacgggccgcctccacacccgcttcaaccagacggccacggccacgggcaggctaagtagctccgatcccaacctccagaacatccccgtccgcaccccgcttgggcagaggatccgccgggccttcatcgccgaggaggggtggctattggtggccctggactatagccagatagagctcagggtgctggcccacctctccggcgacgagaacctgatccgggtcttccaggaggggcgggacatccacacggagaccgccagctggatgttcggcgtcccccgggaggccgtggaccccctgatgcgccgggcggccaagaccatcaacttcggggtcctctacggcatgtcggcccaccgcctctcccaggagctagccatcccttacgaggaggcccaggccttcattgagcgctactttcagagcttccccaaggtgcgggcctggattgagaagaccctggaggagggcaggaggcgggggtacgtggagaccctcttcggccgccgccgctacgtgccagacctagaggcccgggtgaagagcgtgcgggagggtgccgagcgcatggccttcaacatgcccgtccagggcaccgccgccgacctcatgaagctggctatggtgaagctcttccccaggctggaggaaatgggggccaggatgctccttcaggtccacgacgagctggtcctcgaggccccaaaagagagggcggaggccgtggcccggctggccaaggaggtcatggagggggtgtatcccctggccgtgcccctggaggtggaggtggggataggggaggactggctctccgccaaggagtgataccaccccatgctggcccaagccagcatgggggccccggcaaaaggtttctggggaagttaccaggcatggtgggccgaaggaaacaggaaacaagggtatgagggttttttgccctaaagaaaggccagggggtcctcccgaaggaaggcttccagggggataccccctgggcccaggagtagcccctttcctccaaaggcctgggtgaaggcttttagccctttggtcctttgggaaggggcgcttttgacctccaaagccagaaggcgccttcccttcttcaagacgaagtcaacctcctggtccctttcccgccagtagtacacctcaaagcccccgtgggggccgtgggccagaaggtgggcgcccacggcggtttccacgagccgccccatgagggcggcgtccgcccacacctcctttggggaaagccccaagaccgccgtgatgagccccgtattaagggccaggagcttggggctcgaggcgcggcgccggaagggctcggcggcgtacttctgcag

SEQ ID NO: 3472 - DNA, 3026 bp, Artificial Sequence
  Description of Artificial Sequence: Synthetic DNA sequence of Thermus aquaticus DNA Polymerase A743Q
atgagggggatgctgcccctctttgagcccaagggccgggtcctcctggtggacggccaccacctggcctaccgcaccttccacgccctgaagggcctcaccaccagccggggggagccggtgcaggcggtctacggcttcgccaagagcctcctcaaggccctcaaggaggacggggacgcggtgatcgtggtctttgacgccaaggccccctccttccgccacgaggcctacggggggtacaaggcgggccgggcccccacgccggaggactttccccggcaactcgccctcatcaaggagctggtggacctcctggggctggcgcgcctcgaggtcccgggctacgaggcggacgacgtcctggccagcctggccaagaaggcggaaaaggagggctacgaggtccgcatcctcaccgccgacaaagacctttaccagctcctttccgaccgcatccacgccctccaccccgaggggtacctcatcaccccggcctggctttgggaaaagtacggcctgaggcccgaccagtgggccgactaccgggccctgaccggggacgagtccgacaaccttcccggggtcaagggcatcggggagaagacggcgaggaagcttctggaggagtgggggagcctggaagccctcctcaagaacctggaccggctgaagcccgccatccgggagaagatcctggcccacatggacgatctgaagctctcctgggacctggccaaggtgcgcaccgacctgcccctggaggtggacttcgccaaaaggcgggagcccgaccgggagaggcttagggcctttctggagaggcttgagtttggcagcctcctccacgagttcggccttctggaaagccccaaggccctggaggaggccccctggcccccgccggaaggggccttcgtgggctttgtgctttcccgcaaggagcccatgtgggccgatcttctggccctggccgccgccagggggggccgggtccaccgggcccccgagccttataaagccctcagggacctgaaggaggcgcgggggcttctcgccaaagacctgagcgttctggccctgagggaaggccttggcctcccgcccggcgacgaccccatgctcctcgcctacctcctggacccttccaacaccacccccgagggggtggcccggcgctacggcggggagtggacggaggaggcgggggagcgggccgccctttccgagaggctcttcgccaacctgtgggggaggcttgagggggaggagaggctcctttggctttaccgggaggtggagaggcccctttccgctgtcctggcccacatggaggccacgggggtgcgcctggacgtggcctatctcagggccttgtccctggaggtggccgaggagatcgcccgcctcgaggccgaggtcttccgcctggccggccaccccttcaacctcaactcccgggaccagctggaaagggtcctctttgacgagctagggcttcccgccatcggcaagacggagaagaccggcaagcgctccaccagcgccgccgtcctggaggccctccgcgaggcccaccccatcgtggagaagatcctgcagtaccgggagctcaccaagctgaagagcacctacattgaccccttgccggacctcatccaccccaggacgggccgcctccacacccgcttcaaccagacggccacggccacgggcaggctaagtagctccgatcccaacctccagaacatccccgtccgcaccccgcttgggcagaggatccgccgggccttcatcgccgaggaggggtggctattggtggccctggactatagccagatagagctcagggtgctggcccacctctccggcgacgagaacctgatccgggtcttccaggaggggcgggacatccacacggagaccgccagctggatgttcggcgtcccccgggaggccgtggaccccctgatgcgccgggcggccaagaccatcaacttcggggtcctctacggcatgtcggcccaccgcctctcccaggagctagccatcccttacgaggaggcccaggccttcattgagcgctactttcagagcttccccaaggtgcgggcctggattgagaagaccctggaggagggcaggaggcgggggtacgtggagaccctcttcggccgccgccgctacgtgccagacctagaggcccgggtgaagagcgtgcgggagcaagccgagcgcatggccttcaacatgcccgtccagggcaccgccgccgacctcatgaagctggctatggtgaagctcttccccaggctggaggaaatgggggccaggatgctccttcaggtccacgacgagctggtcctcgaggccccaaaagagagggcggaggccgtggcccggctggccaaggaggtcatggagggggtgtatcccctggccgtgcccctggaggtggaggtggggataggggaggactggctctccgccaaggagtgataccaccccatgctggcccaagccagcatgggggccccggcaaaaggtttctggggaagttaccaggcatggtgggccgaaggaaacaggaaacaagggtatgagggttttttgccctaaagaaaggccagggggtcctcccgaaggaaggcttccagggggataccccctgggcccaggagtagcccctttcctccaaaggcctgggtgaaggcttttagccctttggtcctttgggaaggggcgcttttgacctccaaagccagaaggcgccttcccttcttcaagacgaagtcaacctcctggtccctttcccgccagtagtacacctcaaagcccccgtgggggccgtgggccagaaggtgggcgcccacggcggtttccacgagccgccccatgagggcggcgtccgcccacacctcctttggggaaagccccaagaccgccgtgatgagccccgtattaagggccaggagcttggggctcgaggcgcggcgccggaagggctcggcggcgtacttctgcag

SEQ ID NO: 3473 - DNA, 3026 bp, Artificial Sequence
  Description of Artificial Sequence: Synthetic DNA sequence of Thermus aquaticus DNA Polymerase A743H
atgagggggatgctgcccctctttgagcccaagggccgggtcctcctggtggacggccaccacctggcctaccgcaccttccacgccctgaagggcctcaccaccagccggggggagccggtgcaggcggtctacggcttcgccaagagcctcctcaaggccctcaaggaggacggggacgcggtgatcgtggtctttgacgccaaggccccctccttccgccacgaggcctacggggggtacaaggcgggccgggcccccacgccggaggactttccccggcaactcgccctcatcaaggagctggtggacctcctggggctggcgcgcctcgaggtcccgggctacgaggcggacgacgtcctggccagcctggccaagaaggcggaaaaggagggctacgaggtccgcatcctcaccgccgacaaagacctttaccagctcctttccgaccgcatccacgccctccaccccgaggggtacctcatcaccccggcctggctttgggaaaagtacggcctgaggcccgaccagtgggccgactaccgggccctgaccggggacgagtccgacaaccttcccggggtcaagggcatcggggagaagacggcgaggaagcttctggaggagtgggggagcctggaagccctcctcaagaacctggaccggctgaagcccgccatccgggagaagatcctggcccacatggacgatctgaagctctcctgggacctggccaaggtgcgcaccgacctgcccctggaggtggacttcgccaaaaggcgggagcccgaccgggagaggcttagggcctttctggagaggcttgagtttggcagcctcctccacgagttcggccttctggaaagccccaaggccctggaggaggccccctggcccccgccggaaggggccttcgtgggctttgtgctttcccgcaaggagcccatgtgggccgatcttctggccctggccgccgccagggggggccgggtccaccgggcccccgagccttataaagccctcagggacctgaaggaggcgcgggggcttctcgccaaagacctgagcgttctggccctgagggaaggccttggcctcccgcccggcgacgaccccatgctcctcgcctacctcctggacccttccaacaccacccccgagggggtggcccggcgctacggcggggagtggacggaggaggcgggggagcgggccgccctttccgagaggctcttcgccaacctgtgggggaggcttgagggggaggagaggctcctttggctttaccgggaggtggagaggcccctttccgctgtcctggcccacatggaggccacgggggtgcgcctggacgtggcctatctcagggccttgtccctggaggtggccgaggagatcgcccgcctcgaggccgaggtcttccgcctggccggccaccccttcaacctcaactcccgggaccagctggaaagggtcctctttgacgagctagggcttcccgccatcggcaagacggagaagaccggcaagcgctccaccagcgccgccgtcctggaggccctccgcgaggcccaccccatcgtggagaagatcctgcagtaccgggagctcaccaagctgaagagcacctacattgaccccttgccggacctcatccaccccaggacgggccgcctccacacccgcttcaaccagacggccacggccacgggcaggctaagtagctccgatcccaacctccagaacatccccgtccgcaccccgcttgggcagaggatccgccgggccttcatcgccgaggaggggtggctattggtggccctggactatagccagatagagctcagggtgctggcccacctctccggcgacgagaacctgatccgggtcttccaggaggggcgggacatccacacggagaccgccagctggatgttcggcgtcccccgggaggccgtggaccccctgatgcgccgggcggccaagaccatcaacttcggggtcctctacggcatgtcggcccaccgcctctcccaggagctagccatcccttacgaggaggcccaggccttcattgagcgctactttcagagcttccccaaggtgcgggcctggattgagaagaccctggaggagggcaggaggcgggggtacgtggagaccctcttcggccgccgccgctacgtgccagacctagaggcccgggtgaagagcgtgcgggagcatgccgagcgcatggccttcaacatgcccgtccagggcaccgccgccgacctcatgaagctggctatggtgaagctcttccccaggctggaggaaatgggggccaggatgctccttcaggtccacgacgagctggtcctcgaggccccaaaagagagggcggaggccgtggcccggctggccaaggaggtcatggagggggtgtatcccctggccgtgcccctggaggtggaggtggggataggggaggactggctctccgccaaggagtgataccaccccatgctggcccaagccagcatgggggccccggcaaaaggtttctggggaagttaccaggcatggtgggccgaaggaaacaggaaacaagggtatgagggttttttgccctaaagaaaggccagggggtcctcccgaaggaaggcttccagggggataccccctgggcccaggagtagcccctttcctccaaaggcctgggtgaaggcttttagccctttggtcctttgggaaggggcgcttttgacctccaaagccagaaggcgccttcccttcttcaagacgaagtcaacctcctggtccctttcccgccagtagtacacctcaaagcccccgtgggggccgtgggccagaaggtgggcgcccacggcggtttccacgagccgccccatgagggcggcgtccgcccacacctcctttggggaaagccccaagaccgccgtgatgagccccgtattaagggccaggagcttggggctcgaggcgcggcgccggaagggctcggcggcgtacttctgcag

SEQ ID NO: 3474 - DNA, 3026 bp, Artificial Sequence
  Description of Artificial Sequence: Synthetic DNA sequence of Thermus aquaticus DNA Polymerase A743I
atgagggggatgctgcccctctttgagcccaagggccgggtcctcctggtggacggccaccacctggcctaccgcaccttccacgccctgaagggcctcaccaccagccggggggagccggtgcaggcggtctacggcttcgccaagagcctcctcaaggccctcaaggaggacggggacgcggtgatcgtggtctttgacgccaaggccccctccttccgccacgaggcctacggggggtacaaggcgggccgggcccccacgccggaggactttccccggcaactcgccctcatcaaggagctggtggacctcctggggctggcgcgcctcgaggtcccgggctacgaggcggacgacgtcctggccagcctggccaagaaggcggaaaaggagggctacgaggtccgcatcctcaccgccgacaaagacctttaccagctcctttccgaccgcatccacgccctccaccccgaggggtacctcatcaccccggcctggctttgggaaaagtacggcctgaggcccgaccagtgggccgactaccgggccctgaccggggacgagtccgacaaccttcccggggtcaagggcatcggggagaagacggcgaggaagcttctggaggagtgggggagcctggaagccctcctcaagaacctggaccggctgaagcccgccatccgggagaagatcctggcccacatggacgatctgaagctctcctgggacctggccaaggtgcgcaccgacctgcccctggaggtggacttcgccaaaaggcgggagcccgaccgggagaggcttagggcctttctggagaggcttgagtttggcagcctcctccacgagttcggccttctggaaagccccaaggccctggaggaggccccctggcccccgccggaaggggccttcgtgggctttgtgctttcccgcaaggagcccatgtgggccgatcttctggccctggccgccgccagggggggccgggtccaccgggcccccgagccttataaagccctcagggacctgaaggaggcgcgggggcttctcgccaaagacctgagcgttctggccctgagggaaggccttggcctcccgcccggcgacgaccccatgctcctcgcctacctcctggacccttccaacaccacccccgagggggtggcccggcgctacggcggggagtggacggaggaggcgggggagcgggccgccctttccgagaggctcttcgccaacctgtgggggaggcttgagggggaggagaggctcctttggctttaccgggaggtggagaggcccctttccgctgtcctggcccacatggaggccacgggggtgcgcctggacgtggcctatctcagggccttgtccctggaggtggccgaggagatcgcccgcctcgaggccgaggtcttccgcctggccggccaccccttcaacctcaactcccgggaccagctggaaagggtcctctttgacgagctagggcttcccgccatcggcaagacggagaagaccggcaagcgctccaccagcgccgccgtcctggaggccctccgcgaggcccaccccatcgtggagaagatcctgcagtaccgggagctcaccaagctgaagagcacctacattgaccccttgccggacctcatccaccccaggacgggccgcctccacacccgcttcaaccagacggccacggccacgggcaggctaagtagctccgatcccaacctccagaacatccccgtccgcaccccgcttgggcagaggatccgccgggccttcatcgccgaggaggggtggctattggtggccctggactatagccagatagagctcagggtgctggcccacctctccggcgacgagaacctgatccgggtcttccaggaggggcgggacatccacacggagaccgccagctggatgttcggcgtcccccgggaggccgtggaccccctgatgcgccgggcggccaagaccatcaacttcggggtcctctacggcatgtcggcccaccgcctctcccaggagctagccatcccttacgaggaggcccaggccttcattgagcgctactttcagagcttccccaaggtgcgggcctggattgagaagaccctggaggagggcaggaggcgggggtacgtggagaccctcttcggccgccgccgctacgtgccagacctagaggcccgggtgaagagcgtgcgggagattgccgagcgcatggccttcaacatgcccgtccagggcaccgccgccgacctcatgaagctggctatggtgaagctcttccccaggctggaggaaatgggggccaggatgctccttcaggtccacgacgagctggtcctcgaggccccaaaagagagggcggaggccgtggcccggctggccaaggaggtcatggagggggtgtatcccctggccgtgcccctggaggtggaggtggggataggggaggactggctctccgccaaggagtgataccaccccatgctggcccaagccagcatgggggccccggcaaaaggtttctggggaagttaccaggcatggtgggccgaaggaaacaggaaacaagggtatgagggttttttgccctaaagaaaggccagggggtcctcccgaaggaaggcttccagggggataccccctgggcccaggagtagcccctttcctccaaaggcctgggtgaaggcttttagccctttggtcctttgggaaggggcgcttttgacctccaaagccagaaggcgccttcccttcttcaagacgaagtcaacctcctggtccctttcccgccagtagtacacctcaaagcccccgtgggggccgtgggccagaaggtgggcgcccacggcggtttccacgagccgccccatgagggcggcgtccgcccacacctcctttggggaaagccccaagaccgccgtgatgagccccgtattaagggccaggagcttggggctcgaggcgcggcgccggaagggctcggcggcgtacttctgcag

SEQ ID NO: 3475 - DNA, 3026 bp, Artificial Sequence
  Description of Artificial Sequence: Synthetic DNA sequence of Thermus aquaticus DNA Polymerase A743L
atgagggggatgctgcccctctttgagcccaagggccgggtcctcctggtggacggccaccacctggcctaccgcaccttccacgccctgaagggcctcaccaccagccggggggagccggtgcaggcggtctacggcttcgccaagagcctcctcaaggccctcaaggaggacggggacgcggtgatcgtggtctttgacgccaaggccccctccttccgccacgaggcctacggggggtacaaggcgggccgggcccccacgccggaggactttccccggcaactcgccctcatcaaggagctggtggacctcctggggctggcgcgcctcgaggtcccgggctacgaggcggacgacgtcctggccagcctggccaagaaggcggaaaaggagggctacgaggtccgcatcctcaccgccgacaaagacctttaccagctcctttccgaccgcatccacgccctccaccccgaggggtacctcatcaccccggcctggctttgggaaaagtacggcctgaggcccgaccagtgggccgactaccgggccctgaccggggacgagtccgacaaccttcccggggtcaagggcatcggggagaagacggcgaggaagcttctggaggagtgggggagcctggaagccctcctcaagaacctggaccggctgaagcccgccatccgggagaagatcctggcccacatggacgatctgaagctctcctgggacctggccaaggtgcgcaccgacctgcccctggaggtggacttcgccaaaaggcgggagcccgaccgggagaggcttagggcctttctggagaggcttgagtttggcagcctcctccacgagttcggccttctggaaagccccaaggccctggaggaggccccctggcccccgccggaaggggccttcgtgggctttgtgctttcccgcaaggagcccatgtgggccgatcttctggccctggccgccgccagggggggccgggtccaccgggcccccgagccttataaagccctcagggacctgaaggaggcgcgggggcttctcgccaaagacctgagcgttctggccctgagggaaggccttggcctcccgcccggcgacgaccccatgctcctcgcctacctcctggacccttccaacaccacccccgagggggtggcccggcgctacggcggggagtggacggaggaggcgggggagcgggccgccctttccgagaggctcttcgccaacctgtgggggaggcttgagggggaggagaggctcctttggctttaccgggaggtggagaggcccctttccgctgtcctggcccacatggaggccacgggggtgcgcctggacgtggcctatctcagggccttgtccctggaggtggccgaggagatcgcccgcctcgaggccgaggtcttccgcctggccggccaccccttcaacctcaactcccgggaccagctggaaagggtcctctttgacgagctagggcttcccgccatcggcaagacggagaagaccggcaagcgctccaccagcgccgccgtcctggaggccctccgcgaggcccaccccatcgtggagaagatcctgcagtaccgggagctcaccaagctgaagagcacctacattgaccccttgccggacctcatccaccccaggacgggccgcctccacacccgcttcaaccagacggccacggccacgggcaggctaagtagctccgatcccaacctccagaacatccccgtccgcaccccgcttgggcagaggatccgccgggccttcatcgccgaggaggggtggctattggtggccctggactatagccagatagagctcagggtgctggcccacctctccggcgacgagaacctgatccgggtcttccaggaggggcgggacatccacacggagaccgccagctggatgttcggcgtcccccgggaggccgtggaccccctgatgcgccgggcggccaagaccatcaacttcggggtcctctacggcatgtcggcccaccgcctctcccaggagctagccatcccttacgaggaggcccaggccttcattgagcgctactttcagagcttccccaaggtgcgggcctggattgagaagaccctggaggagggcaggaggcgggggtacgtggagaccctcttcggccgccgccgctacgtgccagacctagaggcccgggtgaagagcgtgcgggagttagccgagcgcatggccttcaacatgcccgtccagggcaccgccgccgacctcatgaagctggctatggtgaagctcttccccaggctggaggaaatgggggccaggatgctccttcaggtccacgacgagctggtcctcgaggccccaaaagagagggcggaggccgtggcccggctggccaaggaggtcatggagggggtgtatcccctggccgtgcccctggaggtggaggtggggataggggaggactggctctccgccaaggagtgataccaccccatgctggcccaagccagcatgggggccccggcaaaaggtttctggggaagttaccaggcatggtgggccgaaggaaacaggaaacaagggtatgagggttttttgccctaaagaaaggccagggggtcctcccgaaggaaggcttccagggggataccccctgggcccaggagtagcccctttcctccaaaggcctgggtgaaggcttttagccctttggtcctttgggaaggggcgcttttgacctccaaagccagaaggcgccttcccttcttcaagacgaagtcaacctcctggtccctttcccgccagtagtacacctcaaagcccccgtgggggccgtgggccagaaggtgggcgcccacggcggtttccacgagccgccccatgagggcggcgtccgcccacacctcctttggggaaagccccaagaccgccgtgatgagccccgtattaagggccaggagcttggggctcgaggcgcggcgccggaagggctcggcggcgtacttctgcag

SEQ ID NO: 3476 - DNA, 3026 bp, Artificial Sequence
  Description of Artificial Sequence: Synthetic DNA sequence of Thermus aquaticus DNA Polymerase A743K
atgagggggatgctgcccctctttgagcccaagggccgggtcctcctggtggacggccaccacctggcctaccgcaccttccacgccctgaagggcctcaccaccagccggggggagccggtgcaggcggtctacggcttcgccaagagcctcctcaaggccctcaaggaggacggggacgcggtgatcgtggtctttgacgccaaggccccctccttccgccacgaggcctacggggggtacaaggcgggccgggcccccacgccggaggactttccccggcaactcgccctcatcaaggagctggtggacctcctggggctggcgcgcctcgaggtcccgggctacgaggcggacgacgtcctggccagcctggccaagaaggcggaaaaggagggctacgaggtccgcatcctcaccgccgacaaagacctttaccagctcctttccgaccgcatccacgccctccaccccgaggggtacctcatcaccccggcctggctttgggaaaagtacggcctgaggcccgaccagtgggccgactaccgggccctgaccggggacgagtccgacaaccttcccggggtcaagggcatcggggagaagacggcgaggaagcttctggaggagtgggggagcctggaagccctcctcaagaacctggaccggctgaagcccgccatccgggagaagatcctggcccacatggacgatctgaagctctcctgggacctggccaaggtgcgcaccgacctgcccctggaggtggacttcgccaaaaggcgggagcccgaccgggagaggcttagggcctttctggagaggcttgagtttggcagcctcctccacgagttcggccttctggaaagccccaaggccctggaggaggccccctggcccccgccggaaggggccttcgtgggctttgtgctttcccgcaaggagcccatgtgggccgatcttctggccctggccgccgccagggggggccgggtccaccgggcccccgagccttataaagccctcagggacctgaaggaggcgcgggggcttctcgccaaagacctgagcgttctggccctgagggaaggccttggcctcccgcccggcgacgaccccatgctcctcgcctacctcctggacccttccaacaccacccccgagggggtggcccggcgctacggcggggagtggacggaggaggcgggggagcgggccgccctttccgagaggctcttcgccaacctgtgggggaggcttgagggggaggagaggctcctttggctttaccgggaggtggagaggcccctttccgctgtcctggcccacatggaggccacgggggtgcgcctggacgtggcctatctcagggccttgtccctggaggtggccgaggagatcgcccgcctcgaggccgaggtcttccgcctggccggccaccccttcaacctcaactcccgggaccagctggaaagggtcctctttgacgagctagggcttcccgccatcggcaagacggagaagaccggcaagcgctccaccagcgccgccgtcctggaggccctccgcgaggcccaccccatcgtggagaagatcctgcagtaccgggagctcaccaagctgaagagcacctacattgaccccttgccggacctcatccaccccaggacgggccgcctccacacccgcttcaaccagacggccacggccacgggcaggctaagtagctccgatcccaacctccagaacatccccgtccgcaccccgcttgggcagaggatccgccgggccttcatcgccgaggaggggtggctattggtggccctggactatagccagatagagctcagggtgctggcccacctctccggcgacgagaacctgatccgggtcttccaggaggggcgggacatccacacggagaccgccagctggatgttcggcgtcccccgggaggccgtggaccccctgatgcgccgggcggccaagaccatcaacttcggggtcctctacggcatgtcggcccaccgcctctcccaggagctagccatcccttacgaggaggcccaggccttcattgagcgctactttcagagcttccccaaggtgcgggcctggattgagaagaccctggaggagggcaggaggcgggggtacgtggagaccctcttcggccgccgccgctacgtgccagacctagaggcccgggtgaagagcgtgcgggagaaagccgagcgcatggccttcaacatgcccgtccagggcaccgccgccgacctcatgaagctggctatggtgaagctcttccccaggctggaggaaatgggggccaggatgctccttcaggtccacgacgagctggtcctcgaggccccaaaagagagggcggaggccgtggcccggctggccaaggaggtcatggagggggtgtatcccctggccgtgcccctggaggtggaggtggggataggggaggactggctctccgccaaggagtgataccaccccatgctggcccaagccagcatgggggccccggcaaaaggtttctggggaagttaccaggcatggtgggccgaaggaaacaggaaacaagggtatgagggttttttgccctaaagaaaggccagggggtcctcccgaaggaaggcttccagggggataccccctgggcccaggagtagcccctttcctccaaaggcctgggtgaaggcttttagccctttggtcctttgggaaggggcgcttttgacctccaaagccagaaggcgccttcccttcttcaagacgaagtcaacctcctggtccctttcccgccagtagtacacctcaaagcccccgtgggggccgtgggccagaaggtgggcgcccacggcggtttccacgagccgccccatgagggcggcgtccgcccacacctcctttggggaaagccccaagaccgccgtgatgagccccgtattaagggccaggagcttggggctcgaggcgcggcgccggaagggctcggcggcgtacttctgcag

SEQ ID NO: 3477 - DNA, 3026 bp, Artificial Sequence
  Description of Artificial Sequence: Synthetic DNA sequence of Thermus aquaticus DNA Polymerase A743E
atgagggggatgctgcccctctttgagcccaagggccgggtcctcctggtggacggccaccacctggcctaccgcaccttccacgccctgaagggcctcaccaccagccggggggagccggtgcaggcggtctacggcttcgccaagagcctcctcaaggccctcaaggaggacggggacgcggtgatcgtggtctttgacgccaaggccccctccttccgccacgaggcctacggggggtacaaggcgggccgggcccccacgccggaggactttccccggcaactcgccctcatcaaggagctggtggacctcctggggctggcgcgcctcgaggtcccgggctacgaggcggacgacgtcctggccagcctggccaagaaggcggaaaaggagggctacgaggtccgcatcctcaccgccgacaaagacctttaccagctcctttccgaccgcatccacgccctccaccccgaggggtacctcatcaccccggcctggctttgggaaaagtacggcctgaggcccgaccagtgggccgactaccgggccctgaccggggacgagtccgacaaccttcccggggtcaagggcatcggggagaagacggcgaggaagcttctggaggagtgggggagcctggaagccctcctcaagaacctggaccggctgaagcccgccatccgggagaagatcctggcccacatggacgatctgaagctctcctgggacctggccaaggtgcgcaccgacctgcccctggaggtggacttcgccaaaaggcgggagcccgaccgggagaggcttagggcctttctggagaggcttgagtttggcagcctcctccacgagttcggccttctggaaagccccaaggccctggaggaggccccctggcccccgccggaaggggccttcgtgggctttgtgctttcccgcaaggagcccatgtgggccgatcttctggccctggccgccgccagggggggccgggtccaccgggcccccgagccttataaagccctcagggacctgaaggaggcgcgggggcttctcgccaaagacctgagcgttctggccctgagggaaggccttggcctcccgcccggcgacgaccccatgctcctcgcctacctcctggacccttccaacaccacccccgagggggtggcccggcgctacggcggggagtggacggaggaggcgggggagcgggccgccctttccgagaggctcttcgccaacctgtgggggaggcttgagggggaggagaggctcctttggctttaccgggaggtggagaggcccctttccgctgtcctggcccacatggaggccacgggggtgcgcctggacgtggcctatctcagggccttgtccctggaggtggccgaggagatcgcccgcctcgaggccgaggtcttccgcctggccggccaccccttcaacctcaactcccgggaccagctggaaagggtcctctttgacgagctagggcttcccgccatcggcaagacggagaagaccggcaagcgctccaccagcgccgccgtcctggaggccctccgcgaggcccaccccatcgtggagaagatcctgcagtaccgggagctcaccaagctgaagagcacctacattgaccccttgccggacctcatccaccccaggacgggccgcctccacacccgcttcaaccagacggccacggccacgggcaggctaagtagctccgatcccaacctccagaacatccccgtccgcaccccgcttgggcagaggatccgccgggccttcatcgccgaggaggggtggctattggtggccctggactatagccagatagagctcagggtgctggcccacctctccggcgacgagaacctgatccgggtcttccaggaggggcgggacatccacacggagaccgccagctggatgttcggcgtcccccgggaggccgtggaccccctgatgcgccgggcggccaagaccatcaacttcggggtcctctacggcatgtcggcccaccgcctctcccaggagctagccatcccttacgaggaggcccaggccttcattgagcgctactttcagagcttccccaaggtgcgggcctggattgagaagaccctggaggagggcaggaggcgggggtacgtggagaccctcttcggccgccgccgctacgtgccagacctagaggcccgggtgaagagcgtgcgggaggaagccgagcgcatggccttcaacatgcccgtccagggcaccgccgccgacctcatgaagctggctatggtgaagctcttccccaggctggaggaaatgggggccaggatgctccttcaggtccacgacgagctggtcctcgaggccccaaaagagagggcggaggccgtggcccggctggccaaggaggtcatggagggggtgtatcccctggccgtgcccctggaggtggaggtggggataggggaggactggctctccgccaaggagtgataccaccccatgctggcccaagccagcatgggggccccggcaaaaggtttctggggaagttaccaggcatggtgggccgaaggaaacaggaaacaagggtatgagggttttttgccctaaagaaaggccagggggtcctcccgaaggaaggcttccagggggataccccctgggcccaggagtagcccctttcctccaaaggcctgggtgaaggcttttagccctttggtcctttgggaaggggcgcttttgacctccaaagccagaaggcgccttcccttcttcaagacgaagtcaacctcctggtccctttcccgccagtagtacacctcaaagcccccgtgggggccgtgggccagaaggtgggcgcccacggcggtttccacgagccgccccatgagggcggcgtccgcccacacctcctttggggaaagccccaagaccgccgtgatgagccccgtattaagggccaggagcttggggctcgaggcgcggcgccggaagggctcggcggcgtacttctgcag

SEQ ID NO: 3478 - DNA, 3026 bp, Artificial Sequence
  Description of Artificial Sequence: Synthetic DNA sequence of Thermus aquaticus DNA Polymerase A743D
atgagggggatgctgcccctctttgagcccaagggccgggtcctcctggtggacggccaccacctggcctaccgcaccttccacgccctgaagggcctcaccaccagccggggggagccggtgcaggcggtctacggcttcgccaagagcctcctcaaggccctcaaggaggacggggacgcggtgatcgtggtctttgacgccaaggccccctccttccgccacgaggcctacggggggtacaaggcgggccgggcccccacgccggaggactttccccggcaactcgccctcatcaaggagctggtggacctcctggggctggcgcgcctcgaggtcccgggctacgaggcggacgacgtcctggccagcctggccaagaaggcggaaaaggagggctacgaggtccgcatcctcaccgccgacaaagacctttaccagctcctttccgaccgcatccacgccctccaccccgaggggtacctcatcaccccggcctggctttgggaaaagtacggcctgaggcccgaccagtgggccgactaccgggccctgaccggggacgagtccgacaaccttcccggggtcaagggcatcggggagaagacggcgaggaagcttctggaggagtgggggagcctggaagccctcctcaagaacctggaccggctgaagcccgccatccgggagaagatcctggcccacatggacgatctgaagctctcctgggacctggccaaggtgcgcaccgacctgcccctggaggtggacttcgccaaaaggcgggagcccgaccgggagaggcttagggcctttctggagaggcttgagtttggcagcctcctccacgagttcggccttctggaaagccccaaggccctggaggaggccccctggcccccgccggaaggggccttcgtgggctttgtgctttcccgcaaggagcccatgtgggccgatcttctggccctggccgccgccagggggggccgggtccaccgggcccccgagccttataaagccctcagggacctgaaggaggcgcgggggcttctcgccaaagacctgagcgttctggccctgagggaaggccttggcctcccgcccggcgacgaccccatgctcctcgcctacctcctggacccttccaacaccacccccgagggggtggcccggcgctacggcggggagtggacggaggaggcgggggagcgggccgccctttccgagaggctcttcgccaacctgtgggggaggcttgagggggaggagaggctcctttggctttaccgggaggtggagaggcccctttccgctgtcctggcccacatggaggccacgggggtgcgcctggacgtggcctatctcagggccttgtccctggaggtggccgaggagatcgcccgcctcgaggccgaggtcttccgcctggccggccaccccttcaacctcaactcccgggaccagctggaaagggtcctctttgacgagctagggcttcccgccatcggcaagacggagaagaccggcaagcgctccaccagcgccgccgtcctggaggccctccgcgaggcccaccccatcgtggagaagatcctgcagtaccgggagctcaccaagctgaagagcacctacattgaccccttgccggacctcatccaccccaggacgggccgcctccacacccgcttcaaccagacggccacggccacgggcaggctaagtagctccgatcccaacctccagaacatccccgtccgcaccccgcttgggcagaggatccgccgggccttcatcgccgaggaggggtggctattggtggccctggactatagccagatagagctcagggtgctggcccacctctccggcgacgagaacctgatccgggtcttccaggaggggcgggacatccacacggagaccgccagctggatgttcggcgtcccccgggaggccgtggaccccctgatgcgccgggcggccaagaccatcaacttcggggtcctctacggcatgtcggcccaccgcctctcccaggagctagccatcccttacgaggaggcccaggccttcattgagcgctactttcagagcttccccaaggtgcgggcctggattgagaagaccctggaggagggcaggaggcgggggtacgtggagaccctcttcggccgccgccgctacgtgccagacctagaggcccgggtgaagagcgtgcgggaggatgccgagcgcatggccttcaacatgcccgtccagggcaccgccgccgacctcatgaagctggctatggtgaagctcttccccaggctggaggaaatgggggccaggatgctccttcaggtccacgacgagctggtcctcgaggccccaaaagagagggcggaggccgtggcccggctggccaaggaggtcatggagggggtgtatcccctggccgtgcccctggaggtggaggtggggataggggaggactggctctccgccaaggagtgataccaccccatgctggcccaagccagcatgggggccccggcaaaaggtttctggggaagttaccaggcatggtgggccgaaggaaacaggaaacaagggtatgagggttttttgccctaaagaaaggccagggggtcctcccgaaggaaggcttccagggggataccccctgggcccaggagtagcccctttcctccaaaggcctgggtgaaggcttttagccctttggtcctttgggaaggggcgcttttgacctccaaagccagaaggcgccttcccttcttcaagacgaagtcaacctcctggtccctttcccgccagtagtacacctcaaagcccccgtgggggccgtgggccagaaggtgggcgcccacggcggtttccacgagccgccccatgagggcggcgtccgcccacacctcctttggggaaagccccaagaccgccgtgatgagccccgtattaagggccaggagcttggggctcgaggcgcggcgccggaagggctcggcggcgtacttctgcag

SEQ ID NO: 3479 - DNA, 3026 bp, Artificial Sequence
  Description of Artificial Sequence: Synthetic DNA sequence of Thermus aquaticus DNA Polymerase A743F
atgagggggatgctgcccctctttgagcccaagggccgggtcctcctggtggacggccaccacctggcctaccgcaccttccacgccctgaagggcctcaccaccagccggggggagccggtgcaggcggtctacggcttcgccaagagcctcctcaaggccctcaaggaggacggggacgcggtgatcgtggtctttgacgccaaggccccctccttccgccacgaggcctacggggggtacaaggcgggccgggcccccacgccggaggactttccccggcaactcgccctcatcaaggagctggtggacctcctggggctggcgcgcctcgaggtcccgggctacgaggcggacgacgtcctggccagcctggccaagaaggcggaaaaggagggctacgaggtccgcatcctcaccgccgacaaagacctttaccagctcctttccgaccgcatccacgccctccaccccgaggggtacctcatcaccccggcctggctttgggaaaagtacggcctgaggcccgaccagtgggccgactaccgggccctgaccggggacgagtccgacaaccttcccggggtcaagggcatcggggagaagacggcgaggaagcttctggaggagtgggggagcctggaagccctcctcaagaacctggaccggctgaagcccgccatccgggagaagatcctggcccacatggacgatctgaagctctcctgggacctggccaaggtgcgcaccgacctgcccctggaggtggacttcgccaaaaggcgggagcccgaccgggagaggcttagggcctttctggagaggcttgagtttggcagcctcctccacgagttcggccttctggaaagccccaaggccctggaggaggccccctggcccccgccggaaggggccttcgtgggctttgtgctttcccgcaaggagcccatgtgggccgatcttctggccctggccgccgccagggggggccgggtccaccgggcccccgagccttataaagccctcagggacctgaaggaggcgcgggggcttctcgccaaagacctgagcgttctggccctgagggaaggccttggcctcccgcccggcgacgaccccatgctcctcgcctacctcctggacccttccaacaccacccccgagggggtggcccggcgctacggcggggagtggacggaggaggcgggggagcgggccgccctttccgagaggctcttcgccaacctgtgggggaggcttgagggggaggagaggctcctttggctttaccgggaggtggagaggcccctttccgctgtcctggcccacatggaggccacgggggtgcgcctggacgtggcctatctcagggccttgtccctggaggtggccgaggagatcgcccgcctcgaggccgaggtcttccgcctggccggccaccccttcaacctcaactcccgggaccagctggaaagggtcctctttgacgagctagggcttcccgccatcggcaagacggagaagaccggcaagcgctccaccagcgccgccgtcctggaggccctccgcgaggcccaccccatcgtggagaagatcctgcagtaccgggagctcaccaagctgaagagcacctacattgaccccttgccggacctcatccaccccaggacgggccgcctccacacccgcttcaaccagacggccacggccacgggcaggctaagtagctccgatcccaacctccagaacatccccgtccgcaccccgcttgggcagaggatccgccgggccttcatcgccgaggaggggtggctattggtggccctggactatagccagatagagctcagggtgctggcccacctctccggcgacgagaacctgatccgggtcttccaggaggggcgggacatccacacggagaccgccagctggatgttcggcgtcccccgggaggccgtggaccccctgatgcgccgggcggccaagaccatcaacttcggggtcctctacggcatgtcggcccaccgcctctcccaggagctagccatcccttacgaggaggcccaggccttcattgagcgctactttcagagcttccccaaggtgcgggcctggattgagaagaccctggaggagggcaggaggcgggggtacgtggagaccctcttcggccgccgccgctacgtgccagacctagaggcccgggtgaagagcgtgcgggagtttgccgagcgcatggccttcaacatgcccgtccagggcaccgccgccgacctcatgaagctggctatggtgaagctcttccccaggctggaggaaatgggggccaggatgctccttcaggtccacgacgagctggtcctcgaggccccaaaagagagggcggaggccgtggcccggctggccaaggaggtcatggagggggtgtatcccctggccgtgcccctggaggtggaggtggggataggggaggactggctctccgccaaggagtgataccaccccatgctggcccaagccagcatgggggccccggcaaaaggtttctggggaagttaccaggcatggtgggccgaaggaaacaggaaacaagggtatgagggttttttgccctaaagaaaggccagggggtcctcccgaaggaaggcttccagggggataccccctgggcccaggagtagcccctttcctccaaaggcctgggtgaaggcttttagccctttggtcctttgggaaggggcgcttttgacctccaaagccagaaggcgccttcccttcttcaagacgaagtcaacctcctggtccctttcccgccagtagtacacctcaaagcccccgtgggggccgtgggccagaaggtgggcgcccacggcggtttccacgagccgccccatgagggcggcgtccgcccacacctcctttggggaaagccccaagaccgccgtgatgagccccgtattaagggccaggagcttggggctcgaggcgcggcgccggaagggctcggcggcgtacttctgcag

SEQ ID NO: 3480 - DNA, 3026 bp, Artificial Sequence
  Description of Artificial Sequence: Synthetic DNA sequence of Thermus aquaticus DNA Polymerase A743S
atgagggggatgctgcccctctttgagcccaagggccgggtcctcctggtggacggccaccacctggcctaccgcaccttccacgccctgaagggcctcaccaccagccggggggagccggtgcaggcggtctacggcttcgccaagagcctcctcaaggccctcaaggaggacggggacgcggtgatcgtggtctttgacgccaaggccccctccttccgccacgaggcctacggggggtacaaggcgggccgggcccccacgccggaggactttccccggcaactcgccctcatcaaggagctggtggacctcctggggctggcgcgcctcgaggtcccgggctacgaggcggacgacgtcctggccagcctggccaagaaggcggaaaaggagggctacgaggtccgcatcctcaccgccgacaaagacctttaccagctcctttccgaccgcatccacgccctccaccccgaggggtacctcatcaccccggcctggctttgggaaaagtacggcctgaggcccgaccagtgggccgactaccgggccctgaccggggacgagtccgacaaccttcccggggtcaagggcatcggggagaagacggcgaggaagcttctggaggagtgggggagcctggaagccctcctcaagaacctggaccggctgaagcccgccatccgggagaagatcctggcccacatggacgatctgaagctctcctgggacctggccaaggtgcgcaccgacctgcccctggaggtggacttcgccaaaaggcgggagcccgaccgggagaggcttagggcctttctggagaggcttgagtttggcagcctcctccacgagttcggccttctggaaagccccaaggccctggaggaggccccctggcccccgccggaaggggccttcgtgggctttgtgctttcccgcaaggagcccatgtgggccgatcttctggccctggccgccgccagggggggccgggtccaccgggcccccgagccttataaagccctcagggacctgaaggaggcgcgggggcttctcgccaaagacctgagcgttctggccctgagggaaggccttggcctcccgcccggcgacgaccccatgctcctcgcctacctcctggacccttccaacaccacccccgagggggtggcccggcgctacggcggggagtggacggaggaggcgggggagcgggccgccctttccgagaggctcttcgccaacctgtgggggaggcttgagggggaggagaggctcctttggctttaccgggaggtggagaggcccctttccgctgtcctggcccacatggaggccacgggggtgcgcctggacgtggcctatctcagggccttgtccctggaggtggccgaggagatcgcccgcctcgaggccgaggtcttccgcctggccggccaccccttcaacctcaactcccgggaccagctggaaagggtcctctttgacgagctagggcttcccgccatcggcaagacggagaagaccggcaagcgctccaccagcgccgccgtcctggaggccctccgcgaggcccaccccatcgtggagaagatcctgcagtaccgggagctcaccaagctgaagagcacctacattgaccccttgccggacctcatccaccccaggacgggccgcctccacacccgcttcaaccagacggccacggccacgggcaggctaagtagctccgatcccaacctccagaacatccccgtccgcaccccgcttgggcagaggatccgccgggccttcatcgccgaggaggggtggctattggtggccctggactatagccagatagagctcagggtgctggcccacctctccggcgacgagaacctgatccgggtcttccaggaggggcgggacatccacacggagaccgccagctggatgttcggcgtcccccgggaggccgtggaccccctgatgcgccgggcggccaagaccatcaacttcggggtcctctacggcatgtcggcccaccgcctctcccaggagctagccatcccttacgaggaggcccaggccttcattgagcgctactttcagagcttccccaaggtgcgggcctggattgagaagaccctggaggagggcaggaggcgggggtacgtggagaccctcttcggccgccgccgctacgtgccagacctagaggcccgggtgaagagcgtgcgggagtctgccgagcgcatggccttcaacatgcccgtccagggcaccgccgccgacctcatgaagctggctatggtgaagctcttccccaggctggaggaaatgggggccaggatgctccttcaggtccacgacgagctggtcctcgaggccccaaaagagagggcggaggccgtggcccggctggccaaggaggtcatggagggggtgtatcccctggccgtgcccctggaggtggaggtggggataggggaggactggctctccgccaaggagtgataccaccccatgctggcccaagccagcatgggggccccggcaaaaggtttctggggaagttaccaggcatggtgggccgaaggaaacaggaaacaagggtatgagggttttttgccctaaagaaaggccagggggtcctcccgaaggaaggcttccagggggataccccctgggcccaggagtagcccctttcctccaaaggcctgggtgaaggcttttagccctttggtcctttgggaaggggcgcttttgacctccaaagccagaaggcgccttcccttcttcaagacgaagtcaacctcctggtccctttcccgccagtagtacacctcaaagcccccgtgggggccgtgggccagaaggtgggcgcccacggcggtttccacgagccgccccatgagggcggcgtccgcccacacctcctttggggaaagccccaagaccgccgtgatgagccccgtattaagggccaggagcttggggctcgaggcgcggcgccggaagggctcggcggcgtacttctgcag

SEQ ID NO: 3481 - DNA, 3026 bp, Artificial Sequence
  Description of Artificial Sequence: Synthetic DNA sequence of Thermus aquaticus DNA Polymerase A743Y
atgagggggatgctgcccctctttgagcccaagggccgggtcctcctggtggacggccaccacctggcctaccgcaccttccacgccctgaagggcctcaccaccagccggggggagccggtgcaggcggtctacggcttcgccaagagcctcctcaaggccctcaaggaggacggggacgcggtgatcgtggtctttgacgccaaggccccctccttccgccacgaggcctacggggggtacaaggcgggccgggcccccacgccggaggactttccccggcaactcgccctcatcaaggagctggtggacctcctggggctggcgcgcctcgaggtcccgggctacgaggcggacgacgtcctggccagcctggccaagaaggcggaaaaggagggctacgaggtccgcatcctcaccgccgacaaagacctttaccagctcctttccgaccgcatccacgccctccaccccgaggggtacctcatcaccccggcctggctttgggaaaagtacggcctgaggcccgaccagtgggccgactaccgggccctgaccggggacgagtccgacaaccttcccggggtcaagggcatcggggagaagacggcgaggaagcttctggaggagtgggggagcctggaagccctcctcaagaacctggaccggctgaagcccgccatccgggagaagatcctggcccacatggacgatctgaagctctcctgggacctggccaaggtgcgcaccgacctgcccctggaggtggacttcgccaaaaggcgggagcccgaccgggagaggcttagggcctttctggagaggcttgagtttggcagcctcctccacgagttcggccttctggaaagccccaaggccctggaggaggccccctggcccccgccggaaggggccttcgtgggctttgtgctttcccgcaaggagcccatgtgggccgatcttctggccctggccgccgccagggggggccgggtccaccgggcccccgagccttataaagccctcagggacctgaaggaggcgcgggggcttctcgccaaagacctgagcgttctggccctgagggaaggccttggcctcccgcccggcgacgaccccatgctcctcgcctacctcctggacccttccaacaccacccccgagggggtggcccggcgctacggcggggagtggacggaggaggcgggggagcgggccgccctttccgagaggctcttcgccaacctgtgggggaggcttgagggggaggagaggctcctttggctttaccgggaggtggagaggcccctttccgctgtcctggcccacatggaggccacgggggtgcgcctggacgtggcctatctcagggccttgtccctggaggtggccgaggagatcgcccgcctcgaggccgaggtcttccgcctggccggccaccccttcaacctcaactcccgggaccagctggaaagggtcctctttgacgagctagggcttcccgccatcggcaagacggagaagaccggcaagcgctccaccagcgccgccgtcctggaggccctccgcgaggcccaccccatcgtggagaagatcctgcagtaccgggagctcaccaagctgaagagcacctacattgaccccttgccggacctcatccaccccaggacgggccgcctccacacccgcttcaaccagacggccacggccacgggcaggctaagtagctccgatcccaacctccagaacatccccgtccgcaccccgcttgggcagaggatccgccgggccttcatcgccgaggaggggtggctattggtggccctggactatagccagatagagctcagggtgctggcccacctctccggcgacgagaacctgatccgggtcttccaggaggggcgggacatccacacggagaccgccagctggatgttcggcgtcccccgggaggccgtggaccccctgatgcgccgggcggccaagaccatcaacttcggggtcctctacggcatgtcggcccaccgcctctcccaggagctagccatcccttacgaggaggcccaggccttcattgagcgctactttcagagcttccccaaggtgcgggcctggattgagaagaccctggaggagggcaggaggcgggggtacgtggagaccctcttcggccgccgccgctacgtgccagacctagaggcccgggtgaagagcgtgcgggagtatgccgagcgcatggccttcaacatgcccgtccagggcaccgccgccgacctcatgaagctggctatggtgaagctcttccccaggctggaggaaatgggggccaggatgctccttcaggtccacgacgagctggtcctcgaggccccaaaagagagggcggaggccgtggcccggctggccaaggaggtcatggagggggtgtatcccctggccgtgcccctggaggtggaggtggggataggggaggactggctctccgccaaggagtgataccaccccatgctggcccaagccagcatgggggccccggcaaaaggtttctggggaagttaccaggcatggtgggccgaaggaaacaggaaacaagggtatgagggttttttgccctaaagaaaggccagggggtcctcccgaaggaaggcttccagggggataccccctgggcccaggagtagcccctttcctccaaaggcctgggtgaaggcttttagccctttggtcctttgggaaggggcgcttttgacctccaaagccagaaggcgccttcccttcttcaagacgaagtcaacctcctggtccctttcccgccagtagtacacctcaaagcccccgtgggggccgtgggccagaaggtgggcgcccacggcggtttccacgagccgccccatgagggcggcgtccgcccacacctcctttggggaaagccccaagaccgccgtgatgagccccgtattaagggccaggagcttggggctcgaggcgcggcgccggaagggctcggcggcgtacttctgcag

SEQ ID NO: 3482 - DNA, 3026 bp, Artificial Sequence
  Description of Artificial Sequence: Synthetic DNA sequence of Thermus aquaticus DNA Polymerase A743W
atgagggggatgctgcccctctttgagcccaagggccgggtcctcctggtggacggccaccacctggcctaccgcaccttccacgccctgaagggcctcaccaccagccggggggagccggtgcaggcggtctacggcttcgccaagagcctcctcaaggccctcaaggaggacggggacgcggtgatcgtggtctttgacgccaaggccccctccttccgccacgaggcctacggggggtacaaggcgggccgggcccccacgccggaggactttccccggcaactcgccctcatcaaggagctggtggacctcctggggctggcgcgcctcgaggtcccgggctacgaggcggacgacgtcctggccagcctggccaagaaggcggaaaaggagggctacgaggtccgcatcctcaccgccgacaaagacctttaccagctcctttccgaccgcatccacgccctccaccccgaggggtacctcatcaccccggcctggctttgggaaaagtacggcctgaggcccgaccagtgggccgactaccgggccctgaccggggacgagtccgacaaccttcccggggtcaagggcatcggggagaagacggcgaggaagcttctggaggagtgggggagcctggaagccctcctcaagaacctggaccggctgaagcccgccatccgggagaagatcctggcccacatggacgatctgaagctctcctgggacctggccaaggtgcgcaccgacctgcccctggaggtggacttcgccaaaaggcgggagcccgaccgggagaggcttagggcctttctggagaggcttgagtttggcagcctcctccacgagttcggccttctggaaagccccaaggccctggaggaggccccctggcccccgccggaaggggccttcgtgggctttgtgctttcccgcaaggagcccatgtgggccgatcttctggccctggccgccgccagggggggccgggtccaccgggcccccgagccttataaagccctcagggacctgaaggaggcgcgggggcttctcgccaaagacctgagcgttctggccctgagggaaggccttggcctcccgcccggcgacgaccccatgctcctcgcctacctcctggacccttccaacaccacccccgagggggtggcccggcgctacggcggggagtggacggaggaggcgggggagcgggccgccctttccgagaggctcttcgccaacctgtgggggaggcttgagggggaggagaggctcctttggctttaccgggaggtggagaggcccctttccgctgtcctggcccacatggaggccacgggggtgcgcctggacgtggcctatctcagggccttgtccctggaggtggccgaggagatcgcccgcctcgaggccgaggtcttccgcctggccggccaccccttcaacctcaactcccgggaccagctggaaagggtcctctttgacgagctagggcttcccgccatcggcaagacggagaagaccggcaagcgctccaccagcgccgccgtcctggaggccctccgcgaggcccaccccatcgtggagaagatcctgcagtaccgggagctcaccaagctgaagagcacctacattgaccccttgccggacctcatccaccccaggacgggccgcctccacacccgcttcaaccagacggccacggccacgggcaggctaagtagctccgatcccaacctccagaacatccccgtccgcaccccgcttgggcagaggatccgccgggccttcatcgccgaggaggggtggctattggtggccctggactatagccagatagagctcagggtgctggcccacctctccggcgacgagaacctgatccgggtcttccaggaggggcgggacatccacacggagaccgccagctggatgttcggcgtcccccgggaggccgtggaccccctgatgcgccgggcggccaagaccatcaacttcggggtcctctacggcatgtcggcccaccgcctctcccaggagctagccatcccttacgaggaggcccaggccttcattgagcgctactttcagagcttccccaaggtgcgggcctggattgagaagaccctggaggagggcaggaggcgggggtacgtggagaccctcttcggccgccgccgctacgtgccagacctagaggcccgggtgaagagcgtgcgggagtgggccgagcgcatggccttcaacatgcccgtccagggcaccgccgccgacctcatgaagctggctatggtgaagctcttccccaggctggaggaaatgggggccaggatgctccttcaggtccacgacgagctggtcctcgaggccccaaaagagagggcggaggccgtggcccggctggccaaggaggtcatggagggggtgtatcccctggccgtgcccctggaggtggaggtggggataggggaggactggctctccgccaaggagtgataccaccccatgctggcccaagccagcatgggggccccggcaaaaggtttctggggaagttaccaggcatggtgggccgaaggaaacaggaaacaagggtatgagggttttttgccctaaagaaaggccagggggtcctcccgaaggaaggcttccagggggataccccctgggcccaggagtagcccctttcctccaaaggcctgggtgaaggcttttagccctttggtcctttgggaaggggcgcttttgacctccaaagccagaaggcgccttcccttcttcaagacgaagtcaacctcctggtccctttcccgccagtagtacacctcaaagcccccgtgggggccgtgggccagaaggtgggcgcccacggcggtttccacgagccgccccatgagggcggcgtccgcccacacctcctttggggaaagccccaagaccgccgtgatgagccccgtattaagggccaggagcttggggctcgaggcgcggcgccggaagggctcggcggcgtacttctgcag

SEQ ID NO: 3483 - DNA, 3026 bp, Artificial Sequence
  Description of Artificial Sequence: Synthetic DNA sequence of Thermus aquaticus DNA Polymerase A743P
atgagggggatgctgcccctctttgagcccaagggccgggtcctcctggtggacggccaccacctggcctaccgcaccttccacgccctgaagggcctcaccaccagccggggggagccggtgcaggcggtctacggcttcgccaagagcctcctcaaggccctcaaggaggacggggacgcggtgatcgtggtctttgacgccaaggccccctccttccgccacgaggcctacggggggtacaaggcgggccgggcccccacgccggaggactttccccggcaactcgccctcatcaaggagctggtggacctcctggggctggcgcgcctcgaggtcccgggctacgaggcggacgacgtcctggccagcctggccaagaaggcggaaaaggagggctacgaggtccgcatcctcaccgccgacaaagacctttaccagctcctttccgaccgcatccacgccctccaccccgaggggtacctcatcaccccggcctggctttgggaaaagtacggcctgaggcccgaccagtgggccgactaccgggccctgaccggggacgagtccgacaaccttcccggggtcaagggcatcggggagaagacggcgaggaagcttctggaggagtgggggagcctggaagccctcctcaagaacctggaccggctgaagcccgccatccgggagaagatcctggcccacatggacgatctgaagctctcctgggacctggccaaggtgcgcaccgacctgcccctggaggtggacttcgccaaaaggcgggagcccgaccgggagaggcttagggcctttctggagaggcttgagtttggcagcctcctccacgagttcggccttctggaaagccccaaggccctggaggaggccccctggcccccgccggaaggggccttcgtgggctttgtgctttcccgcaaggagcccatgtgggccgatcttctggccctggccgccgccagggggggccgggtccaccgggcccccgagccttataaagccctcagggacctgaaggaggcgcgggggcttctcgccaaagacctgagcgttctggccctgagggaaggccttggcctcccgcccggcgacgaccccatgctcctcgcctacctcctggacccttccaacaccacccccgagggggtggcccggcgctacggcggggagtggacggaggaggcgggggagcgggccgccctttccgagaggctcttcgccaacctgtgggggaggcttgagggggaggagaggctcctttggctttaccgggaggtggagaggcccctttccgctgtcctggcccacatggaggccacgggggtgcgcctggacgtggcctatctcagggccttgtccctggaggtggccgaggagatcgcccgcctcgaggccgaggtcttccgcctggccggccaccccttcaacctcaactcccgggaccagctggaaagggtcctctttgacgagctagggcttcccgccatcggcaagacggagaagaccggcaagcgctccaccagcgccgccgtcctggaggccctccgcgaggcccaccccatcgtggagaagatcctgcagtaccgggagctcaccaagctgaagagcacctacattgaccccttgccggacctcatccaccccaggacgggccgcctccacacccgcttcaaccagacggccacggccacgggcaggctaagtagctccgatcccaacctccagaacatccccgtccgcaccccgcttgggcagaggatccgccgggccttcatcgccgaggaggggtggctattggtggccctggactatagccagatagagctcagggtgctggcccacctctccggcgacgagaacctgatccgggtcttccaggaggggcgggacatccacacggagaccgccagctggatgttcggcgtcccccgggaggccgtggaccccctgatgcgccgggcggccaagaccatcaacttcggggtcctctacggcatgtcggcccaccgcctctcccaggagctagccatcccttacgaggaggcccaggccttcattgagcgctactttcagagcttccccaaggtgcgggcctggattgagaagaccctggaggagggcaggaggcgggggtacgtggagaccctcttcggccgccgccgctacgtgccagacctagaggcccgggtgaagagcgtgcgggagcctgccgagcgcatggccttcaacatgcccgtccagggcaccgccgccgacctcatgaagctggctatggtgaagctcttccccaggctggaggaaatgggggccaggatgctccttcaggtccacgacgagctggtcctcgaggccccaaaagagagggcggaggccgtggcccggctggccaaggaggtcatggagggggtgtatcccctggccgtgcccctggaggtggaggtggggataggggaggactggctctccgccaaggagtgataccaccccatgctggcccaagccagcatgggggccccggcaaaaggtttctggggaagttaccaggcatggtgggccgaaggaaacaggaaacaagggtatgagggttttttgccctaaagaaaggccagggggtcctcccgaaggaaggcttccagggggataccccctgggcccaggagtagcccctttcctccaaaggcctgggtgaaggcttttagccctttggtcctttgggaaggggcgcttttgacctccaaagccagaaggcgccttcccttcttcaagacgaagtcaacctcctggtccctttcccgccagtagtacacctcaaagcccccgtgggggccgtgggccagaaggtgggcgcccacggcggtttccacgagccgccccatgagggcggcgtccgcccacacctcctttggggaaagccccaagaccgccgtgatgagccccgtattaagggccaggagcttggggctcgaggcgcggcgccggaagggctcggcggcgtacttctgcag

SEQ ID NO: 3484 - DNA, 3026 bp, Artificial Sequence
  Description of Artificial Sequence: Synthetic DNA sequence of Thermus aquaticus DNA Polymerase A743M
atgagggggatgctgcccctctttgagcccaagggccgggtcctcctggtggacggccaccacctggcctaccgcaccttccacgccctgaagggcctcaccaccagccggggggagccggtgcaggcggtctacggcttcgccaagagcctcctcaaggccctcaaggaggacggggacgcggtgatcgtggtctttgacgccaaggccccctccttccgccacgaggcctacggggggtacaaggcgggccgggcccccacgccggaggactttccccggcaactcgccctcatcaaggagctggtggacctcctggggctggcgcgcctcgaggtcccgggctacgaggcggacgacgtcctggccagcctggccaagaaggcggaaaaggagggctacgaggtccgcatcctcaccgccgacaaagacctttaccagctcctttccgaccgcatccacgccctccaccccgaggggtacctcatcaccccggcctggctttgggaaaagtacggcctgaggcccgaccagtgggccgactaccgggccctgaccggggacgagtccgacaaccttcccggggtcaagggcatcggggagaagacggcgaggaagcttctggaggagtgggggagcctggaagccctcctcaagaacctggaccggctgaagcccgccatccgggagaagatcctggcccacatggacgatctgaagctctcctgggacctggccaaggtgcgcaccgacctgcccctggaggtggacttcgccaaaaggcgggagcccgaccgggagaggcttagggcctttctggagaggcttgagtttggcagcctcctccacgagttcggccttctggaaagccccaaggccctggaggaggccccctggcccccgccggaaggggccttcgtgggctttgtgctttcccgcaaggagcccatgtgggccgatcttctggccctggccgccgccagggggggccgggtccaccgggcccccgagccttataaagccctcagggacctgaaggaggcgcgggggcttctcgccaaagacctgagcgttctggccctgagggaaggccttggcctcccgcccggcgacgaccccatgctcctcgcctacctcctggacccttccaacaccacccccgagggggtggcccggcgctacggcggggagtggacggaggaggcgggggagcgggccgccctttccgagaggctcttcgccaacctgtgggggaggcttgagggggaggagaggctcctttggctttaccgggaggtggagaggcccctttccgctgtcctggcccacatggaggccacgggggtgcgcctggacgtggcctatctcagggccttgtccctggaggtggccgaggagatcgcccgcctcgaggccgaggtcttccgcctggccggccaccccttcaacctcaactcccgggaccagctggaaagggtcctctttgacgagctagggcttcccgccatcggcaagacggagaagaccggcaagcgctccaccagcgccgccgtcctggaggccctccgcgaggcccaccccatcgtggagaagatcctgcagtaccgggagctcaccaagctgaagagcacctacattgaccccttgccggacctcatccaccccaggacgggccgcctccacacccgcttcaaccagacggccacggccacgggcaggctaagtagctccgatcccaacctccagaacatccccgtccgcaccccgcttgggcagaggatccgccgggccttcatcgccgaggaggggtggctattggtggccctggactatagccagatagagctcagggtgctggcccacctctccggcgacgagaacctgatccgggtcttccaggaggggcgggacatccacacggagaccgccagctggatgttcggcgtcccccgggaggccgtggaccccctgatgcgccgggcggccaagaccatcaacttcggggtcctctacggcatgtcggcccaccgcctctcccaggagctagccatcccttacgaggaggcccaggccttcattgagcgctactttcagagcttccccaaggtgcgggcctggattgagaagaccctggaggagggcaggaggcgggggtacgtggagaccctcttcggccgccgccgctacgtgccagacctagaggcccgggtgaagagcgtgcgggagatggccgagcgcatggccttcaacatgcccgtccagggcaccgccgccgacctcatgaagctggctatggtgaagctcttccccaggctggaggaaatgggggccaggatgctccttcaggtccacgacgagctggtcctcgaggccccaaaagagagggcggaggccgtggcccggctggccaaggaggtcatggagggggtgtatcccctggccgtgcccctggaggtggaggtggggataggggaggactggctctccgccaaggagtgataccaccccatgctggcccaagccagcatgggggccccggcaaaaggtttctggggaagttaccaggcatggtgggccgaaggaaacaggaaacaagggtatgagggttttttgccctaaagaaaggccagggggtcctcccgaaggaaggcttccagggggataccccctgggcccaggagtagcccctttcctccaaaggcctgggtgaaggcttttagccctttggtcctttgggaaggggcgcttttgacctccaaagccagaaggcgccttcccttcttcaagacgaagtcaacctcctggtccctttcccgccagtagtacacctcaaagcccccgtgggggccgtgggccagaaggtgggcgcccacggcggtttccacgagccgccccatgagggcggcgtccgcccacacctcctttggggaaagccccaagaccgccgtgatgagccccgtattaagggccaggagcttggggctcgaggcgcggcgccggaagggctcggcggcgtacttctgcag

SEQ ID NO: 3485 - DNA, 3026 bp, Artificial Sequence
  Description of Artificial Sequence: Synthetic DNA sequence of Thermus aquaticus DNA Polymerase A743T
atgagggggatgctgcccctctttgagcccaagggccgggtcctcctggtggacggccaccacctggcctaccgcaccttccacgccctgaagggcctcaccaccagccggggggagccggtgcaggcggtctacggcttcgccaagagcctcctcaaggccctcaaggaggacggggacgcggtgatcgtggtctttgacgccaaggccccctccttccgccacgaggcctacggggggtacaaggcgggccgggcccccacgccggaggactttccccggcaactcgccctcatcaaggagctggtggacctcctggggctggcgcgcctcgaggtcccgggctacgaggcggacgacgtcctggccagcctggccaagaaggcggaaaaggagggctacgaggtccgcatcctcaccgccgacaaagacctttaccagctcctttccgaccgcatccacgccctccaccccgaggggtacctcatcaccccggcctggctttgggaaaagtacggcctgaggcccgaccagtgggccgactaccgggccctgaccggggacgagtccgacaaccttcccggggtcaagggcatcggggagaagacggcgaggaagcttctggaggagtgggggagcctggaagccctcctcaagaacctggaccggctgaagcccgccatccgggagaagatcctggcccacatggacgatctgaagctctcctgggacctggccaaggtgcgcaccgacctgcccctggaggtggacttcgccaaaaggcgggagcccgaccgggagaggcttagggcctttctggagaggcttgagtttggcagcctcctccacgagttcggccttctggaaagccccaaggccctggaggaggccccctggcccccgccggaaggggccttcgtgggctttgtgctttcccgcaaggagcccatgtgggccgatcttctggccctggccgccgccagggggggccgggtccaccgggcccccgagccttataaagccctcagggacctgaaggaggcgcgggggcttctcgccaaagacctgagcgttctggccctgagggaaggccttggcctcccgcccggcgacgaccccatgctcctcgcctacctcctggacccttccaacaccacccccgagggggtggcccggcgctacggcggggagtggacggaggaggcgggggagcgggccgccctttccgagaggctcttcgccaacctgtgggggaggcttgagggggaggagaggctcctttggctttaccgggaggtggagaggcccctttccgctgtcctggcccacatggaggccacgggggtgcgcctggacgtggcctatctcagggccttgtccctggaggtggccgaggagatcgcccgcctcgaggccgaggtcttccgcctggccggccaccccttcaacctcaactcccgggaccagctggaaagggtcctctttgacgagctagggcttcccgccatcggcaagacggagaagaccggcaagcgctccaccagcgccgccgtcctggaggccctccgcgaggcccaccccatcgtggagaagatcctgcagtaccgggagctcaccaagctgaagagcacctacattgaccccttgccggacctcatccaccccaggacgggccgcctccacacccgcttcaaccagacggccacggccacgggcaggctaagtagctccgatcccaacctccagaacatccccgtccgcaccccgcttgggcagaggatccgccgggccttcatcgccgaggaggggtggctattggtggccctggactatagccagatagagctcagggtgctggcccacctctccggcgacgagaacctgatccgggtcttccaggaggggcgggacatccacacggagaccgccagctggatgttcggcgtcccccgggaggccgtggaccccctgatgcgccgggcggccaagaccatcaacttcggggtcctctacggcatgtcggcccaccgcctctcccaggagctagccatcccttacgaggaggcccaggccttcattgagcgctactttcagagcttccccaaggtgcgggcctggattgagaagaccctggaggagggcaggaggcgggggtacgtggagaccctcttcggccgccgccgctacgtgccagacctagaggcccgggtgaagagcgtgcgggagactgccgagcgcatggccttcaacatgcccgtccagggcaccgccgccgacctcatgaagctggctatggtgaagctcttccccaggctggaggaaatgggggccaggatgctccttcaggtccacgacgagctggtcctcgaggccccaaaagagagggcggaggccgtggcccggctggccaaggaggtcatggagggggtgtatcccctggccgtgcccctggaggtggaggtggggataggggaggactggctctccgccaaggagtgataccaccccatgctggcccaagccagcatgggggccccggcaaaaggtttctggggaagttaccaggcatggtgggccgaaggaaacaggaaacaagggtatgagggttttttgccctaaagaaaggccagggggtcctcccgaaggaaggcttccagggggataccccctgggcccaggagtagcccctttcctccaaaggcctgggtgaaggcttttagccctttggtcctttgggaaggggcgcttttgacctccaaagccagaaggcgccttcccttcttcaagacgaagtcaacctcctggtccctttcccgccagtagtacacctcaaagcccccgtgggggccgtgggccagaaggtgggcgcccacggcggtttccacgagccgccccatgagggcggcgtccgcccacacctcctttggggaaagccccaagaccgccgtgatgagccccgtattaagggccaggagcttggggctcgaggcgcggcgccggaagggctcggcggcgtacttctgcag

SEQ ID NO: 3486 - DNA, 3026 bp, Artificial Sequence
  Description of Artificial Sequence: Synthetic DNA sequence of Thermus aquaticus DNA Polymerase A743N
atgagggggatgctgcccctctttgagcccaagggccgggtcctcctggtggacggccaccacctggcctaccgcaccttccacgccctgaagggcctcaccaccagccggggggagccggtgcaggcggtctacggcttcgccaagagcctcctcaaggccctcaaggaggacggggacgcggtgatcgtggtctttgacgccaaggccccctccttccgccacgaggcctacggggggtacaaggcgggccgggcccccacgccggaggactttccccggcaactcgccctcatcaaggagctggtggacctcctggggctggcgcgcctcgaggtcccgggctacgaggcggacgacgtcctggccagcctggccaagaaggcggaaaaggagggctacgaggtccgcatcctcaccgccgacaaagacctttaccagctcctttccgaccgcatccacgccctccaccccgaggggtacctcatcaccccggcctggctttgggaaaagtacggcctgaggcccgaccagtgggccgactaccgggccctgaccggggacgagtccgacaaccttcccggggtcaagggcatcggggagaagacggcgaggaagcttctggaggagtgggggagcctggaagccctcctcaagaacctggaccggctgaagcccgccatccgggagaagatcctggcccacatggacgatctgaagctctcctgggacctggccaaggtgcgcaccgacctgcccctggaggtggacttcgccaaaaggcgggagcccgaccgggagaggcttagggcctttctggagaggcttgagtttggcagcctcctccacgagttcggccttctggaaagccccaaggccctggaggaggccccctggcccccgccggaaggggccttcgtgggctttgtgctttcccgcaaggagcccatgtgggccgatcttctggccctggccgccgccagggggggccgggtccaccgggcccccgagccttataaagccctcagggacctgaaggaggcgcgggggcttctcgccaaagacctgagcgttctggccctgagggaaggccttggcctcccgcccggcgacgaccccatgctcctcgcctacctcctggacccttccaacaccacccccgagggggtggcccggcgctacggcggggagtggacggaggaggcgggggagcgggccgccctttccgagaggctcttcgccaacctgtgggggaggcttgagggggaggagaggctcctttggctttaccgggaggtggagaggcccctttccgctgtcctggcccacatggaggccacgggggtgcgcctggacgtggcctatctcagggccttgtccctggaggtggccgaggagatcgcccgcctcgaggccgaggtcttccgcctggccggccaccccttcaacctcaactcccgggaccagctggaaagggtcctctttgacgagctagggcttcccgccatcggcaagacggagaagaccggcaagcgctccaccagcgccgccgtcctggaggccctccgcgaggcccaccccatcgtggagaagatcctgcagtaccgggagctcaccaagctgaagagcacctacattgaccccttgccggacctcatccaccccaggacgggccgcctccacacccgcttcaaccagacggccacggccacgggcaggctaagtagctccgatcccaacctccagaacatccccgtccgcaccccgcttgggcagaggatccgccgggccttcatcgccgaggaggggtggctattggtggccctggactatagccagatagagctcagggtgctggcccacctctccggcgacgagaacctgatccgggtcttccaggaggggcgggacatccacacggagaccgccagctggatgttcggcgtcccccgggaggccgtggaccccctgatgcgccgggcggccaagaccatcaacttcggggtcctctacggcatgtcggcccaccgcctctcccaggagctagccatcccttacgaggaggcccaggccttcattgagcgctactttcagagcttccccaaggtgcgggcctggattgagaagaccctggaggagggcaggaggcgggggtacgtggagaccctcttcggccgccgccgctacgtgccagacctagaggcccgggtgaagagcgtgcgggagaatgccgagcgcatggccttcaacatgcccgtccagggcaccgccgccgacctcatgaagctggctatggtgaagctcttccccaggctggaggaaatgggggccaggatgctccttcaggtccacgacgagctggtcctcgaggccccaaaagagagggcggaggccgtggcccggctggccaaggaggtcatggagggggtgtatcccctggccgtgcccctggaggtggaggtggggataggggaggactggctctccgccaaggagtgataccaccccatgctggcccaagccagcatgggggccccggcaaaaggtttctggggaagttaccaggcatggtgggccgaaggaaacaggaaacaagggtatgagggttttttgccctaaagaaaggccagggggtcctcccgaaggaaggcttccagggggataccccctgggcccaggagtagcccctttcctccaaaggcctgggtgaaggcttttagccctttggtcctttgggaaggggcgcttttgacctccaaagccagaaggcgccttcccttcttcaagacgaagtcaacctcctggtccctttcccgccagtagtacacctcaaagcccccgtgggggccgtgggccagaaggtgggcgcccacggcggtttccacgagccgccccatgagggcggcgtccgcccacacctcctttggggaaagccccaagaccgccgtgatgagccccgtattaagggccaggagcttggggctcgaggcgcggcgccggaagggctcggcggcgtacttctgcag

SEQ ID NO: 3487 - DNA, 3026 bp, Artificial Sequence
  Description of Artificial Sequence: Synthetic DNA sequence of Thermus aquaticus DNA Polymerase A743V
atgagggggatgctgcccctctttgagcccaagggccgggtcctcctggtggacggccaccacctggcctaccgcaccttccacgccctgaagggcctcaccaccagccggggggagccggtgcaggcggtctacggcttcgccaagagcctcctcaaggccctcaaggaggacggggacgcggtgatcgtggtctttgacgccaaggccccctccttccgccacgaggcctacggggggtacaaggcgggccgggcccccacgccggaggactttccccggcaactcgccctcatcaaggagctggtggacctcctggggctggcgcgcctcgaggtcccgggctacgaggcggacgacgtcctggccagcctggccaagaaggcggaaaaggagggctacgaggtccgcatcctcaccgccgacaaagacctttaccagctcctttccgaccgcatccacgccctccaccccgaggggtacctcatcaccccggcctggctttgggaaaagtacggcctgaggcccgaccagtgggccgactaccgggccctgaccggggacgagtccgacaaccttcccggggtcaagggcatcggggagaagacggcgaggaagcttctggaggagtgggggagcctggaagccctcctcaagaacctggaccggctgaagcccgccatccgggagaagatcctggcccacatggacgatctgaagctctcctgggacctggccaaggtgcgcaccgacctgcccctggaggtggacttcgccaaaaggcgggagcccgaccgggagaggcttagggcctttctggagaggcttgagtttggcagcctcctccacgagttcggccttctggaaagccccaaggccctggaggaggccccctggcccccgccggaaggggccttcgtgggctttgtgctttcccgcaaggagcccatgtgggccgatcttctggccctggccgccgccagggggggccgggtccaccgggcccccgagccttataaagccctcagggacctgaaggaggcgcgggggcttctcgccaaagacctgagcgttctggccctgagggaaggccttggcctcccgcccggcgacgaccccatgctcctcgcctacctcctggacccttccaacaccacccccgagggggtggcccggcgctacggcggggagtggacggaggaggcgggggagcgggccgccctttccgagaggctcttcgccaacctgtgggggaggcttgagggggaggagaggctcctttggctttaccgggaggtggagaggcccctttccgctgtcctggcccacatggaggccacgggggtgcgcctggacgtggcctatctcagggccttgtccctggaggtggccgaggagatcgcccgcctcgaggccgaggtcttccgcctggccggccaccccttcaacctcaactcccgggaccagctggaaagggtcctctttgacgagctagggcttcccgccatcggcaagacggagaagaccggcaagcgctccaccagcgccgccgtcctggaggccctccgcgaggcccaccccatcgtggagaagatcctgcagtaccgggagctcaccaagctgaagagcacctacattgaccccttgccggacctcatccaccccaggacgggccgcctccacacccgcttcaaccagacggccacggccacgggcaggctaagtagctccgatcccaacctccagaacatccccgtccgcaccccgcttgggcagaggatccgccgggccttcatcgccgaggaggggtggctattggtggccctggactatagccagatagagctcagggtgctggcccacctctccggcgacgagaacctgatccgggtcttccaggaggggcgggacatccacacggagaccgccagctggatgttcggcgtcccccgggaggccgtggaccccctgatgcgccgggcggccaagaccatcaacttcggggtcctctacggcatgtcggcccaccgcctctcccaggagctagccatcccttacgaggaggcccaggccttcattgagcgctactttcagagcttccccaaggtgcgggcctggattgagaagaccctggaggagggcaggaggcgggggtacgtggagaccctcttcggccgccgccgctacgtgccagacctagaggcccgggtgaagagcgtgcgggaggtcgccgagcgcatggccttcaacatgcccgtccagggcaccgccgccgacctcatgaagctggctatggtgaagctcttccccaggctggaggaaatgggggccaggatgctccttcaggtccacgacgagctggtcctcgaggccccaaaagagagggcggaggccgtggcccggctggccaaggaggtcatggagggggtgtatcccctggccgtgcccctggaggtggaggtggggataggggaggactggctctccgccaaggagtgataccaccccatgctggcccaagccagcatgggggccccggcaaaaggtttctggggaagttaccaggcatggtgggccgaaggaaacaggaaacaagggtatgagggttttttgccctaaagaaaggccagggggtcctcccgaaggaaggcttccagggggataccccctgggcccaggagtagcccctttcctccaaaggcctgggtgaaggcttttagccctttggtcctttgggaaggggcgcttttgacctccaaagccagaaggcgccttcccttcttcaagacgaagtcaacctcctggtccctttcccgccagtagtacacctcaaagcccccgtgggggccgtgggccagaaggtgggcgcccacggcggtttccacgagccgccccatgagggcggcgtccgcccacacctcctttggggaaagccccaagaccgccgtgatgagccccgtattaagggccaggagcttggggctcgaggcgcggcgccggaagggctcggcggcgtacttctgcag

SEQ ID NO: 3488 - DNA, 3221 bp, Artificial Sequence
  Description of Artificial Sequence: Synthetic DNA sequence of Thermus thermophilus DNA Polymerase E539A
tctagaggaagcatgagcctcaccctggcagacaaggtggtctacgaggaggagatccagaaaagccgcttcatcgccaaggcggcccccgtggcctcggaggaggaggccttggcgtttttggccgagaaccgggagcctgaggccacccacaacggccacgcctacaagatcggcctcctctaccgcttctctgacgacggggagccctcgggcaccgcaggcaggcccatcctccacgccatagaggcccagggcctggaccgggtggcggtcctggtggtgcgctacttcggcggggtgaagctcggggccggggggcttgtgcgggcctacgggggggtggcggcggaggccttaaggcgggcgcccaaggtccccttggtggagcgggtggggctcgccttcctcgtgcccttcgccgaggtgggccgggtctacgccctcctggaggcccgcgcccctgaaggccgaggagacctacaccccggaggcgtgcgcttcgccctcctcctccccaagcccgagcgggaaggtttcctcagggcgctcctggacgccacccggggacaggtggccctggagtagcatggaggcgatgcttccgctctttgaacccaaaggccgggtcctcctggtggacggccaccacctggcctaccgcaccttcttcgccctgaagggcctcaccacgagccggggcgaaccggtgcaggcggtctacggcttcgccaagagcctcctcaaggccctgaaggaggacgggtacaaggccgtcttcgtggtctttgacgccaaggccccctccttccgccacgaggcctacgaggcctacaaggcggggagggccccgacccccgaggacttcccccggcagctcgccctcatcaaggagctggtggacctcctggggtttacccgcctcgaggtccccggctacgaggcggacgacgttctcgccaccctggccaagaaggcggaaaaggaggggtacgaggtgcgcatcctcaccgccgaccgcgacctctaccaactcgtctccgaccgcgtcgccgtcctccaccccgagggccacctcatcaccccggagtggctttgggagaagtacggcctcaggccggagcagtgggtggacttccgcgccctcgtgggggacccctccgacaacctccccggggtcaagggcatcggggagaagaccgccctcaagctcctcaaggagtggggaagcctggaaaacctcctcaagaacctggaccgggtaaagccagaaaacgtccgggagaagatcaaggcccacctggaagacctcaggctctccttggagctctcccgggtgcgcaccgacctccccctggaggtggacctcgcccaggggcgggagcccgaccgggaggggcttagggccttcctggagaggctggagttcggcagcctcctccacgagttcggcctcctggaggcccccgcccccctggaggaggccccctggcccccgccggaaggggccttcgtgggcttcgtcctctcccgccccgagcccatgtgggcggagcttaaagccctggccgcctgcagggacggccgggtgcaccgggcagcagaccccttggcggggctaaaggacctcaaggaggtccggggcctcctcgccaaggacctcgccgtcttggcctcgagggaggggctagacctcgtgcccggggacgaccccatgctcctcgcctacctcctggacccctccaacaccacccccgagggggtggcgcggcgctacgggggggagtggacggaggacgccgcccaccgggccctcctctcggagaggctccatcggaacctccttaagcgcctcgagggggaggagaagctcctttggctctaccacgaggtggaaaagcccctctcccgggtcctggcccacatggaggccaccggggtacggcgggacgtggcctaccttcaggccctttccctggagcttgcggaggagatccgccgcctcgaggaggaggtcttccgcttggcgggccaccccttcaacctcaactcccgggaccagctggaaagggtgctctttgacgagcttaggcttcccgccttggggaagacgcaaaagacaggcaagcgctccaccagcgccgcggtgctggaggccctacgggaggcccaccccatcgtggagaagatcctccagcaccgggctctcaccaagctcaagaacacctacgtggaccccctcccaagcctcgtccacccgaggacgggccgcctccacacccgcttcaaccagacggccacggccacggggaggcttagtagctccgaccccaacctgcagaacatccccgtccgcacccccttgggccagaggatccgccgggccttcgtggccgaggcgggttgggcgttggtggccctggactatagccagatagagctccgcgtcctcgcccacctctccggggacgaaaacctgatcagggtcttccaggaggggaaggacatccacacccagaccgcaagctggatgttcggcgtccccccggaggccgtggaccccctgatgcgccgggcggccaagacggtgaacttcggcgtcctctacggcatgtccgcccataggctctcccaggagcttgccatcccctacgaggaggcggtggcctttatagagcgctacttccaaagcttccccaaggtgcgggcctggatagaaaagaccctggaggaggggaggaagcggggctacgtggaaaccctcttcggaagaaggcgctacgtgcccgacctcaacgcccgggtgaagagcgtcagggaggccgcggagcgcatggccttcaacatgcccgtccagggcaccgccgccgacctcatgaagctcgccatggtgaagctcttcccccgcctccgggagatgggggcccgcatgctcctccaggtccacgacgagctcctcctggaggccccccaagcgcgggccgaggaggtggcggctttggccaaggaggccatggagaaggcctatcccctcgccgtgcccctggaggtggaggtggggatgggggaggactggctttccgccaagggttaggggggccctgccgtttagaggaagttcaaggggttgtccctcagaaacgcctccaggggaacgccctctgggcctaccaggaggcctttagccccaaaggtgcgggtgaaggcttccaggccctggg

SEQ ID NO: 3489 - DNA, 3221 bp, Artificial Sequence
  Description of Artificial Sequence: Synthetic DNA sequence of Thermus thermophilus DNA Polymerase E539R
tctagaggaagcatgagcctcaccctggcagacaaggtggtctacgaggaggagatccagaaaagccgcttcatcgccaaggcggcccccgtggcctcggaggaggaggccttggcgtttttggccgagaaccgggagcctgaggccacccacaacggccacgcctacaagatcggcctcctctaccgcttctctgacgacggggagccctcgggcaccgcaggcaggcccatcctccacgccatagaggcccagggcctggaccgggtggcggtcctggtggtgcgctacttcggcggggtgaagctcggggccggggggcttgtgcgggcctacgggggggtggcggcggaggccttaaggcgggcgcccaaggtccccttggtggagcgggtggggctcgccttcctcgtgcccttcgccgaggtgggccgggtctacgccctcctggaggcccgcgcccctgaaggccgaggagacctacaccccggaggcgtgcgcttcgccctcctcctccccaagcccgagcgggaaggtttcctcagggcgctcctggacgccacccggggacaggtggccctggagtagcatggaggcgatgcttccgctctttgaacccaaaggccgggtcctcctggtggacggccaccacctggcctaccgcaccttcttcgccctgaagggcctcaccacgagccggggcgaaccggtgcaggcggtctacggcttcgccaagagcctcctcaaggccctgaaggaggacgggtacaaggccgtcttcgtggtctttgacgccaaggccccctccttccgccacgaggcctacgaggcctacaaggcggggagggccccgacccccgaggacttcccccggcagctcgccctcatcaaggagctggtggacctcctggggtttacccgcctcgaggtccccggctacgaggcggacgacgttctcgccaccctggccaagaaggcggaaaaggaggggtacgaggtgcgcatcctcaccgccgaccgcgacctctaccaactcgtctccgaccgcgtcgccgtcctccaccccgagggccacctcatcaccccggagtggctttgggagaagtacggcctcaggccggagcagtgggtggacttccgcgccctcgtgggggacccctccgacaacctccccggggtcaagggcatcggggagaagaccgccctcaagctcctcaaggagtggggaagcctggaaaacctcctcaagaacctggaccgggtaaagccagaaaacgtccgggagaagatcaaggcccacctggaagacctcaggctctccttggagctctcccgggtgcgcaccgacctccccctggaggtggacctcgcccaggggcgggagcccgaccgggaggggcttagggccttcctggagaggctggagttcggcagcctcctccacgagttcggcctcctggaggcccccgcccccctggaggaggccccctggcccccgccggaaggggccttcgtgggcttcgtcctctcccgccccgagcccatgtgggcggagcttaaagccctggccgcctgcagggacggccgggtgcaccgggcagcagaccccttggcggggctaaaggacctcaaggaggtccggggcctcctcgccaaggacctcgccgtcttggcctcgagggaggggctagacctcgtgcccggggacgaccccatgctcctcgcctacctcctggacccctccaacaccacccccgagggggtggcgcggcgctacgggggggagtggacggaggacgccgcccaccgggccctcctctcggagaggctccatcggaacctccttaagcgcctcgagggggaggagaagctcctttggctctaccacgaggtggaaaagcccctctcccgggtcctggcccacatggaggccaccggggtacggcgggacgtggcctaccttcaggccctttccctggagcttgcggaggagatccgccgcctcgaggaggaggtcttccgcttggcgggccaccccttcaacctcaactcccgggaccagctggaaagggtgctctttgacgagcttaggcttcccgccttggggaagacgcaaaagacaggcaagcgctccaccagcgccgcggtgctggaggccctacgggaggcccaccccatcgtggagaagatcctccagcaccggcgtctcaccaagctcaagaacacctacgtggaccccctcccaagcctcgtccacccgaggacgggccgcctccacacccgcttcaaccagacggccacggccacggggaggcttagtagctccgaccccaacctgcagaacatccccgtccgcacccccttgggccagaggatccgccgggccttcgtggccgaggcgggttgggcgttggtggccctggactatagccagatagagctccgcgtcctcgcccacctctccggggacgaaaacctgatcagggtcttccaggaggggaaggacatccacacccagaccgcaagctggatgttcggcgtccccccggaggccgtggaccccctgatgcgccgggcggccaagacggtgaacttcggcgtcctctacggcatgtccgcccataggctctcccaggagcttgccatcccctacgaggaggcggtggcctttatagagcgctacttccaaagcttccccaaggtgcgggcctggatagaaaagaccctggaggaggggaggaagcggggctacgtggaaaccctcttcggaagaaggcgctacgtgcccgacctcaacgcccgggtgaagagcgtcagggaggccgcggagcgcatggccttcaacatgcccgtccagggcaccgccgccgacctcatgaagctcgccatggtgaagctcttcccccgcctccgggagatgggggcccgcatgctcctccaggtccacgacgagctcctcctggaggccccccaagcgcgggccgaggaggtggcggctttggccaaggaggccatggagaaggcctatcccctcgccgtgcccctggaggtggaggtggggatgggggaggactggctttccgccaagggttaggggggccctgccgtttagaggaagttcaaggggttgtccctcagaaacgcctccaggggaacgccctctgggcctaccaggaggcctttagccccaaaggtgcgggtgaaggcttccaggccctggg

SEQ ID NO: 3490 - DNA, 3221 bp, Artificial Sequence
  Description of Artificial Sequence: Synthetic DNA sequence of Thermus thermophilus DNA Polymerase E539N
tctagaggaagcatgagcctcaccctggcagacaaggtggtctacgaggaggagatccagaaaagccgcttcatcgccaaggcggcccccgtggcctcggaggaggaggccttggcgtttttggccgagaaccgggagcctgaggccacccacaacggccacgcctacaagatcggcctcctctaccgcttctctgacgacggggagccctcgggcaccgcaggcaggcccatcctccacgccatagaggcccagggcctggaccgggtggcggtcctggtggtgcgctacttcggcggggtgaagctcggggccggggggcttgtgcgggcctacgggggggtggcggcggaggccttaaggcgggcgcccaaggtccccttggtggagcgggtggggctcgccttcctcgtgcccttcgccgaggtgggccgggtctacgccctcctggaggcccgcgcccctgaaggccgaggagacctacaccccggaggcgtgcgcttcgccctcctcctccccaagcccgagcgggaaggtttcctcagggcgctcctggacgccacccggggacaggtggccctggagtagcatggaggcgatgcttccgctctttgaacccaaaggccgggtcctcctggtggacggccaccacctggcctaccgcaccttcttcgccctgaagggcctcaccacgagccggggcgaaccggtgcaggcggtctacggcttcgccaagagcctcctcaaggccctgaaggaggacgggtacaaggccgtcttcgtggtctttgacgccaaggccccctccttccgccacgaggcctacgaggcctacaaggcggggagggccccgacccccgaggacttcccccggcagctcgccctcatcaaggagctggtggacctcctggggtttacccgcctcgaggtccccggctacgaggcggacgacgttctcgccaccctggccaagaaggcggaaaaggaggggtacgaggtgcgcatcctcaccgccgaccgcgacctctaccaactcgtctccgaccgcgtcgccgtcctccaccccgagggccacctcatcaccccggagtggctttgggagaagtacggcctcaggccggagcagtgggtggacttccgcgccctcgtgggggacccctccgacaacctccccggggtcaagggcatcggggagaagaccgccctcaagctcctcaaggagtggggaagcctggaaaacctcctcaagaacctggaccgggtaaagccagaaaacgtccgggagaagatcaaggcccacctggaagacctcaggctctccttggagctctcccgggtgcgcaccgacctccccctggaggtggacctcgcccaggggcgggagcccgaccgggaggggcttagggccttcctggagaggctggagttcggcagcctcctccacgagttcggcctcctggaggcccccgcccccctggaggaggccccctggcccccgccggaaggggccttcgtgggcttcgtcctctcccgccccgagcccatgtgggcggagcttaaagccctggccgcctgcagggacggccgggtgcaccgggcagcagaccccttggcggggctaaaggacctcaaggaggtccggggcctcctcgccaaggacctcgccgtcttggcctcgagggaggggctagacctcgtgcccggggacgaccccatgctcctcgcctacctcctggacccctccaacaccacccccgagggggtggcgcggcgctacgggggggagtggacggaggacgccgcccaccgggccctcctctcggagaggctccatcggaacctccttaagcgcctcgagggggaggagaagctcctttggctctaccacgaggtggaaaagcccctctcccgggtcctggcccacatggaggccaccggggtacggcgggacgtggcctaccttcaggccctttccctggagcttgcggaggagatccgccgcctcgaggaggaggtcttccgcttggcgggccaccccttcaacctcaactcccgggaccagctggaaagggtgctctttgacgagcttaggcttcccgccttggggaagacgcaaaagacaggcaagcgctccaccagcgccgcggtgctggaggccctacgggaggcccaccccatcgtggagaagatcctccagcaccggaatctcaccaagctcaagaacacctacgtggaccccctcccaagcctcgtccacccgaggacgggccgcctccacacccgcttcaaccagacggccacggccacggggaggcttagtagctccgaccccaacctgcagaacatccccgtccgcacccccttgggccagaggatccgccgggccttcgtggccgaggcgggttgggcgttggtggccctggactatagccagatagagctccgcgtcctcgcccacctctccggggacgaaaacctgatcagggtcttccaggaggggaaggacatccacacccagaccgcaagctggatgttcggcgtccccccggaggccgtggaccccctgatgcgccgggcggccaagacggtgaacttcggcgtcctctacggcatgtccgcccataggctctcccaggagcttgccatcccctacgaggaggcggtggcctttatagagcgctacttccaaagcttccccaaggtgcgggcctggatagaaaagaccctggaggaggggaggaagcggggctacgtggaaaccctcttcggaagaaggcgctacgtgcccgacctcaacgcccgggtgaagagcgtcagggaggccgcggagcgcatggccttcaacatgcccgtccagggcaccgccgccgacctcatgaagctcgccatggtgaagctcttcccccgcctccgggagatgggggcccgcatgctcctccaggtccacgacgagctcctcctggaggccccccaagcgcgggccgaggaggtggcggctttggccaaggaggccatggagaaggcctatcccctcgccgtgcccctggaggtggaggtggggatgggggaggactggctttccgccaagggttaggggggccctgccgtttagaggaagttcaaggggttgtccctcagaaacgcctccaggggaacgccctctgggcctaccaggaggcctttagccccaaaggtgcgggtgaaggcttccaggccctggg

SEQ ID NO: 3491 - DNA, 3221 bp, Artificial Sequence
  Description of Artificial Sequence: Synthetic DNA sequence of Thermus thermophilus DNA Polymerase E539D
tctagaggaagcatgagcctcaccctggcagacaaggtggtctacgaggaggagatccagaaaagccgcttcatcgccaaggcggcccccgtggcctcggaggaggaggccttggcgtttttggccgagaaccgggagcctgaggccacccacaacggccacgcctacaagatcggcctcctctaccgcttctctgacgacggggagccctcgggcaccgcaggcaggcccatcctccacgccatagaggcccagggcctggaccgggtggcggtcctggtggtgcgctacttcggcggggtgaagctcggggccggggggcttgtgcgggcctacgggggggtggcggcggaggccttaaggcgggcgcccaaggtccccttggtggagcgggtggggctcgccttcctcgtgcccttcgccgaggtgggccgggtctacgccctcctggaggcccgcgcccctgaaggccgaggagacctacaccccggaggcgtgcgcttcgccctcctcctccccaagcccgagcgggaaggtttcctcagggcgctcctggacgccacccggggacaggtggccctggagtagcatggaggcgatgcttccgctctttgaacccaaaggccgggtcctcctggtggacggccaccacctggcctaccgcaccttcttcgccctgaagggcctcaccacgagccggggcgaaccggtgcaggcggtctacggcttcgccaagagcctcctcaaggccctgaaggaggacgggtacaaggccgtcttcgtggtctttgacgccaaggccccctccttccgccacgaggcctacgaggcctacaaggcggggagggccccgacccccgaggacttcccccggcagctcgccctcatcaaggagctggtggacctcctggggtttacccgcctcgaggtccccggctacgaggcggacgacgttctcgccaccctggccaagaaggcggaaaaggaggggtacgaggtgcgcatcctcaccgccgaccgcgacctctaccaactcgtctccgaccgcgtcgccgtcctccaccccgagggccacctcatcaccccggagtggctttgggagaagtacggcctcaggccggagcagtgggtggacttccgcgccctcgtgggggacccctccgacaacctccccggggtcaagggcatcggggagaagaccgccctcaagctcctcaaggagtggggaagcctggaaaacctcctcaagaacctggaccgggtaaagccagaaaacgtccgggagaagatcaaggcccacctggaagacctcaggctctccttggagctctcccgggtgcgcaccgacctccccctggaggtggacctcgcccaggggcgggagcccgaccgggaggggcttagggccttcctggagaggctggagttcggcagcctcctccacgagttcggcctcctggaggcccccgcccccctggaggaggccccctggcccccgccggaaggggccttcgtgggcttcgtcctctcccgccccgagcccatgtgggcggagcttaaagccctggccgcctgcagggacggccgggtgcaccgggcagcagaccccttggcggggctaaaggacctcaaggaggtccggggcctcctcgccaaggacctcgccgtcttggcctcgagggaggggctagacctcgtgcccggggacgaccccatgctcctcgcctacctcctggacccctccaacaccacccccgagggggtggcgcggcgctacgggggggagtggacggaggacgccgcccaccgggccctcctctcggagaggctccatcggaacctccttaagcgcctcgagggggaggagaagctcctttggctctaccacgaggtggaaaagcccctctcccgggtcctggcccacatggaggccaccggggtacggcgggacgtggcctaccttcaggccctttccctggagcttgcggaggagatccgccgcctcgaggaggaggtcttccgcttggcgggccaccccttcaacctcaactcccgggaccagctggaaagggtgctctttgacgagcttaggcttcccgccttggggaagacgcaaaagacaggcaagcgctccaccagcgccgcggtgctggaggccctacgggaggcccaccccatcgtggagaagatcctccagcaccgggatctcaccaagctcaagaacacctacgtggaccccctcccaagcctcgtccacccgaggacgggccgcctccacacccgcttcaaccagacggccacggccacggggaggcttagtagctccgaccccaacctgcagaacatccccgtccgcacccccttgggccagaggatccgccgggccttcgtggccgaggcgggttgggcgttggtggccctggactatagccagatagagctccgcgtcctcgcccacctctccggggacgaaaacctgatcagggtcttccaggaggggaaggacatccacacccagaccgcaagctggatgttcggcgtccccccggaggccgtggaccccctgatgcgccgggcggccaagacggtgaacttcggcgtcctctacggcatgtccgcccataggctctcccaggagcttgccatcccctacgaggaggcggtggcctttatagagcgctacttccaaagcttccccaaggtgcgggcctggatagaaaagaccctggaggaggggaggaagcggggctacgtggaaaccctcttcggaagaaggcgctacgtgcccgacctcaacgcccgggtgaagagcgtcagggaggccgcggagcgcatggccttcaacatgcccgtccagggcaccgccgccgacctcatgaagctcgccatggtgaagctcttcccccgcctccgggagatgggggcccgcatgctcctccaggtccacgacgagctcctcctggaggccccccaagcgcgggccgaggaggtggcggctttggccaaggaggccatggagaaggcctatcccctcgccgtgcccctggaggtggaggtggggatgggggaggactggctttccgccaagggttaggggggccctgccgtttagaggaagttcaaggggttgtccctcagaaacgcctccaggggaacgccctctgggcctaccaggaggcctttagccccaaaggtgcgggtgaaggcttccaggccctggg

SEQ ID NO: 3492 - DNA, 3221 bp, Artificial Sequence
  Description of Artificial Sequence: Synthetic DNA sequence of Thermus thermophilus DNA Polymerase E539C
tctagaggaagcatgagcctcaccctggcagacaaggtggtctacgaggaggagatccagaaaagccgcttcatcgccaaggcggcccccgtggcctcggaggaggaggccttggcgtttttggccgagaaccgggagcctgaggccacccacaacggccacgcctacaagatcggcctcctctaccgcttctctgacgacggggagccctcgggcaccgcaggcaggcccatcctccacgccatagaggcccagggcctggaccgggtggcggtcctggtggtgcgctacttcggcggggtgaagctcggggccggggggcttgtgcgggcctacgggggggtggcggcggaggccttaaggcgggcgcccaaggtccccttggtggagcgggtggggctcgccttcctcgtgcccttcgccgaggtgggccgggtctacgccctcctggaggcccgcgcccctgaaggccgaggagacctacaccccggaggcgtgcgcttcgccctcctcctccccaagcccgagcgggaaggtttcctcagggcgctcctggacgccacccggggacaggtggccctggagtagcatggaggcgatgcttccgctctttgaacccaaaggccgggtcctcctggtggacggccaccacctggcctaccgcaccttcttcgccctgaagggcctcaccacgagccggggcgaaccggtgcaggcggtctacggcttcgccaagagcctcctcaaggccctgaaggaggacgggtacaaggccgtcttcgtggtctttgacgccaaggccccctccttccgccacgaggcctacgaggcctacaaggcggggagggccccgacccccgaggacttcccccggcagctcgccctcatcaaggagctggtggacctcctggggtttacccgcctcgaggtccccggctacgaggcggacgacgttctcgccaccctggccaagaaggcggaaaaggaggggtacgaggtgcgcatcctcaccgccgaccgcgacctctaccaactcgtctccgaccgcgtcgccgtcctccaccccgagggccacctcatcaccccggagtggctttgggagaagtacggcctcaggccggagcagtgggtggacttccgcgccctcgtgggggacccctccgacaacctccccggggtcaagggcatcggggagaagaccgccctcaagctcctcaaggagtggggaagcctggaaaacctcctcaagaacctggaccgggtaaagccagaaaacgtccgggagaagatcaaggcccacctggaagacctcaggctctccttggagctctcccgggtgcgcaccgacctccccctggaggtggacctcgcccaggggcgggagcccgaccgggaggggcttagggccttcctggagaggctggagttcggcagcctcctccacgagttcggcctcctggaggcccccgcccccctggaggaggccccctggcccccgccggaaggggccttcgtgggcttcgtcctctcccgccccgagcccatgtgggcggagcttaaagccctggccgcctgcagggacggccgggtgcaccgggcagcagaccccttggcggggctaaaggacctcaaggaggtccggggcctcctcgccaaggacctcgccgtcttggcctcgagggaggggctagacctcgtgcccggggacgaccccatgctcctcgcctacctcctggacccctccaacaccacccccgagggggtggcgcggcgctacgggggggagtggacggaggacgccgcccaccgggccctcctctcggagaggctccatcggaacctccttaagcgcctcgagggggaggagaagctcctttggctctaccacgaggtggaaaagcccctctcccgggtcctggcccacatggaggccaccggggtacggcgggacgtggcctaccttcaggccctttccctggagcttgcggaggagatccgccgcctcgaggaggaggtcttccgcttggcgggccaccccttcaacctcaactcccgggaccagctggaaagggtgctctttgacgagcttaggcttcccgccttggggaagacgcaaaagacaggcaagcgctccaccagcgccgcggtgctggaggccctacgggaggcccaccccatcgtggagaagatcctccagcaccggtgtctcaccaagctcaagaacacctacgtggaccccctcccaagcctcgtccacccgaggacgggccgcctccacacccgcttcaaccagacggccacggccacggggaggcttagtagctccgaccccaacctgcagaacatccccgtccgcacccccttgggccagaggatccgccgggccttcgtggccgaggcgggttgggcgttggtggccctggactatagccagatagagctccgcgtcctcgcccacctctccggggacgaaaacctgatcagggtcttccaggaggggaaggacatccacacccagaccgcaagctggatgttcggcgtccccccggaggccgtggaccccctgatgcgccgggcggccaagacggtgaacttcggcgtcctctacggcatgtccgcccataggctctcccaggagcttgccatcccctacgaggaggcggtggcctttatagagcgctacttccaaagcttccccaaggtgcgggcctggatagaaaagaccctggaggaggggaggaagcggggctacgtggaaaccctcttcggaagaaggcgctacgtgcccgacctcaacgcccgggtgaagagcgtcagggaggccgcggagcgcatggccttcaacatgcccgtccagggcaccgccgccgacctcatgaagctcgccatggtgaagctcttcccccgcctccgggagatgggggcccgcatgctcctccaggtccacgacgagctcctcctggaggccccccaagcgcgggccgaggaggtggcggctttggccaaggaggccatggagaaggcctatcccctcgccgtgcccctggaggtggaggtggggatgggggaggactggctttccgccaagggttaggggggccctgccgtttagaggaagttcaaggggttgtccctcagaaacgcctccaggggaacgccctctgggcctaccaggaggcctttagccccaaaggtgcgggtgaaggcttccaggccctggg

SEQ ID NO: 3493 - DNA, 3221 bp, Artificial Sequence
  Description of Artificial Sequence: Synthetic DNA sequence of Thermus thermophilus DNA Polymerase E539Q
tctagaggaagcatgagcctcaccctggcagacaaggtggtctacgaggaggagatccagaaaagccgcttcatcgccaaggcggcccccgtggcctcggaggaggaggccttggcgtttttggccgagaaccgggagcctgaggccacccacaacggccacgcctacaagatcggcctcctctaccgcttctctgacgacggggagccctcgggcaccgcaggcaggcccatcctccacgccatagaggcccagggcctggaccgggtggcggtcctggtggtgcgctacttcggcggggtgaagctcggggccggggggcttgtgcgggcctacgggggggtggcggcggaggccttaaggcgggcgcccaaggtccccttggtggagcgggtggggctcgccttcctcgtgcccttcgccgaggtgggccgggtctacgccctcctggaggcccgcgcccctgaaggccgaggagacctacaccccggaggcgtgcgcttcgccctcctcctccccaagcccgagcgggaaggtttcctcagggcgctcctggacgccacccggggacaggtggccctggagtagcatggaggcgatgcttccgctctttgaacccaaaggccgggtcctcctggtggacggccaccacctggcctaccgcaccttcttcgccctgaagggcctcaccacgagccggggcgaaccggtgcaggcggtctacggcttcgccaagagcctcctcaaggccctgaaggaggacgggtacaaggccgtcttcgtggtctttgacgccaaggccccctccttccgccacgaggcctacgaggcctacaaggcggggagggccccgacccccgaggacttcccccggcagctcgccctcatcaaggagctggtggacctcctggggtttacccgcctcgaggtccccggctacgaggcggacgacgttctcgccaccctggccaagaaggcggaaaaggaggggtacgaggtgcgcatcctcaccgccgaccgcgacctctaccaactcgtctccgaccgcgtcgccgtcctccaccccgagggccacctcatcaccccggagtggctttgggagaagtacggcctcaggccggagcagtgggtggacttccgcgccctcgtgggggacccctccgacaacctccccggggtcaagggcatcggggagaagaccgccctcaagctcctcaaggagtggggaagcctggaaaacctcctcaagaacctggaccgggtaaagccagaaaacgtccgggagaagatcaaggcccacctggaagacctcaggctctccttggagctctcccgggtgcgcaccgacctccccctggaggtggacctcgcccaggggcgggagcccgaccgggaggggcttagggccttcctggagaggctggagttcggcagcctcctccacgagttcggcctcctggaggcccccgcccccctggaggaggccccctggcccccgccggaaggggccttcgtgggcttcgtcctctcccgccccgagcccatgtgggcggagcttaaagccctggccgcctgcagggacggccgggtgcaccgggcagcagaccccttggcggggctaaaggacctcaaggaggtccggggcctcctcgccaaggacctcgccgtcttggcctcgagggaggggctagacctcgtgcccggggacgaccccatgctcctcgcctacctcctggacccctccaacaccacccccgagggggtggcgcggcgctacgggggggagtggacggaggacgccgcccaccgggccctcctctcggagaggctccatcggaacctccttaagcgcctcgagggggaggagaagctcctttggctctaccacgaggtggaaaagcccctctcccgggtcctggcccacatggaggccaccggggtacggcgggacgtggcctaccttcaggccctttccctggagcttgcggaggagatccgccgcctcgaggaggaggtcttccgcttggcgggccaccccttcaacctcaactcccgggaccagctggaaagggtgctctttgacgagcttaggcttcccgccttggggaagacgcaaaagacaggcaagcgctccaccagcgccgcggtgctggaggccctacgggaggcccaccccatcgtggagaagatcctccagcaccggcaactcaccaagctcaagaacacctacgtggaccccctcccaagcctcgtccacccgaggacgggccgcctccacacccgcttcaaccagacggccacggccacggggaggcttagtagctccgaccccaacctgcagaacatccccgtccgcacccccttgggccagaggatccgccgggccttcgtggccgaggcgggttgggcgttggtggccctggactatagccagatagagctccgcgtcctcgcccacctctccggggacgaaaacctgatcagggtcttccaggaggggaaggacatccacacccagaccgcaagctggatgttcggcgtccccccggaggccgtggaccccctgatgcgccgggcggccaagacggtgaacttcggcgtcctctacggcatgtccgcccataggctctcccaggagcttgccatcccctacgaggaggcggtggcctttatagagcgctacttccaaagcttccccaaggtgcgggcctggatagaaaagaccctggaggaggggaggaagcggggctacgtggaaaccctcttcggaagaaggcgctacgtgcccgacctcaacgcccgggtgaagagcgtcagggaggccgcggagcgcatggccttcaacatgcccgtccagggcaccgccgccgacctcatgaagctcgccatggtgaagctcttcccccgcctccgggagatgggggcccgcatgctcctccaggtccacgacgagctcctcctggaggccccccaagcgcgggccgaggaggtggcggctttggccaaggaggccatggagaaggcctatcccctcgccgtgcccctggaggtggaggtggggatgggggaggactggctttccgccaagggttaggggggccctgccgtttagaggaagttcaaggggttgtccctcagaaacgcctccaggggaacgccctctgggcctaccaggaggcctttagccccaaaggtgcgggtgaaggcttccaggccctggg

SEQ ID NO: 3494 - DNA, 3221 bp, Artificial Sequence
  Description of Artificial Sequence: Synthetic DNA sequence of Thermus thermophilus DNA Polymerase E539G
tctagaggaagcatgagcctcaccctggcagacaaggtggtctacgaggaggagatccagaaaagccgcttcatcgccaaggcggcccccgtggcctcggaggaggaggccttggcgtttttggccgagaaccgggagcctgaggccacccacaacggccacgcctacaagatcggcctcctctaccgcttctctgacgacggggagccctcgggcaccgcaggcaggcccatcctccacgccatagaggcccagggcctggaccgggtggcggtcctggtggtgcgctacttcggcggggtgaagctcggggccggggggcttgtgcgggcctacgggggggtggcggcggaggccttaaggcgggcgcccaaggtccccttggtggagcgggtggggctcgccttcctcgtgcccttcgccgaggtgggccgggtctacgccctcctggaggcccgcgcccctgaaggccgaggagacctacaccccggaggcgtgcgcttcgccctcctcctccccaagcccgagcgggaaggtttcctcagggcgctcctggacgccacccggggacaggtggccctggagtagcatggaggcgatgcttccgctctttgaacccaaaggccgggtcctcctggtggacggccaccacctggcctaccgcaccttcttcgccctgaagggcctcaccacgagccggggcgaaccggtgcaggcggtctacggcttcgccaagagcctcctcaaggccctgaaggaggacgggtacaaggccgtcttcgtggtctttgacgccaaggccccctccttccgccacgaggcctacgaggcctacaaggcggggagggccccgacccccgaggacttcccccggcagctcgccctcatcaaggagctggtggacctcctggggtttacccgcctcgaggtccccggctacgaggcggacgacgttctcgccaccctggccaagaaggcggaaaaggaggggtacgaggtgcgcatcctcaccgccgaccgcgacctctaccaactcgtctccgaccgcgtcgccgtcctccaccccgagggccacctcatcaccccggagtggctttgggagaagtacggcctcaggccggagcagtgggtggacttccgcgccctcgtgggggacccctccgacaacctccccggggtcaagggcatcggggagaagaccgccctcaagctcctcaaggagtggggaagcctggaaaacctcctcaagaacctggaccgggtaaagccagaaaacgtccgggagaagatcaaggcccacctggaagacctcaggctctccttggagctctcccgggtgcgcaccgacctccccctggaggtggacctcgcccaggggcgggagcccgaccgggaggggcttagggccttcctggagaggctggagttcggcagcctcctccacgagttcggcctcctggaggcccccgcccccctggaggaggccccctggcccccgccggaaggggccttcgtgggcttcgtcctctcccgccccgagcccatgtgggcggagcttaaagccctggccgcctgcagggacggccgggtgcaccgggcagcagaccccttggcggggctaaaggacctcaaggaggtccggggcctcctcgccaaggacctcgccgtcttggcctcgagggaggggctagacctcgtgcccggggacgaccccatgctcctcgcctacctcctggacccctccaacaccacccccgagggggtggcgcggcgctacgggggggagtggacggaggacgccgcccaccgggccctcctctcggagaggctccatcggaacctccttaagcgcctcgagggggaggagaagctcctttggctctaccacgaggtggaaaagcccctctcccgggtcctggcccacatggaggccaccggggtacggcgggacgtggcctaccttcaggccctttccctggagcttgcggaggagatccgccgcctcgaggaggaggtcttccgcttggcgggccaccccttcaacctcaactcccgggaccagctggaaagggtgctctttgacgagcttaggcttcccgccttggggaagacgcaaaagacaggcaagcgctccaccagcgccgcggtgctggaggccctacgggaggcccaccccatcgtggagaagatcctccagcaccggggtctcaccaagctcaagaacacctacgtggaccccctcccaagcctcgtccacccgaggacgggccgcctccacacccgcttcaaccagacggccacggccacggggaggcttagtagctccgaccccaacctgcagaacatccccgtccgcacccccttgggccagaggatccgccgggccttcgtggccgaggcgggttgggcgttggtggccctggactatagccagatagagctccgcgtcctcgcccacctctccggggacgaaaacctgatcagggtcttccaggaggggaaggacatccacacccagaccgcaagctggatgttcggcgtccccccggaggccgtggaccccctgatgcgccgggcggccaagacggtgaacttcggcgtcctctacggcatgtccgcccataggctctcccaggagcttgccatcccctacgaggaggcggtggcctttatagagcgctacttccaaagcttccccaaggtgcgggcctggatagaaaagaccctggaggaggggaggaagcggggctacgtggaaaccctcttcggaagaaggcgctacgtgcccgacctcaacgcccgggtgaagagcgtcagggaggccgcggagcgcatggccttcaacatgcccgtccagggcaccgccgccgacctcatgaagctcgccatggtgaagctcttcccccgcctccgggagatgggggcccgcatgctcctccaggtccacgacgagctcctcctggaggccccccaagcgcgggccgaggaggtggcggctttggccaaggaggccatggagaaggcctatcccctcgccgtgcccctggaggtggaggtggggatgggggaggactggctttccgccaagggttaggggggccctgccgtttagaggaagttcaaggggttgtccctcagaaacgcctccaggggaacgccctctgggcctaccaggaggcctttagccccaaaggtgcgggtgaaggcttccaggccctggg

SEQ ID NO: 3495 - DNA, 3221 bp, Artificial Sequence
  Description of Artificial Sequence: Synthetic DNA sequence of Thermus thermophilus DNA Polymerase E539H
tctagaggaagcatgagcctcaccctggcagacaaggtggtctacgaggaggagatccagaaaagccgcttcatcgccaaggcggcccccgtggcctcggaggaggaggccttggcgtttttggccgagaaccgggagcctgaggccacccacaacggccacgcctacaagatcggcctcctctaccgcttctctgacgacggggagccctcgggcaccgcaggcaggcccatcctccacgccatagaggcccagggcctggaccgggtggcggtcctggtggtgcgctacttcggcggggtgaagctcggggccggggggcttgtgcgggcctacgggggggtggcggcggaggccttaaggcgggcgcccaaggtccccttggtggagcgggtggggctcgccttcctcgtgcccttcgccgaggtgggccgggtctacgccctcctggaggcccgcgcccctgaaggccgaggagacctacaccccggaggcgtgcgcttcgccctcctcctccccaagcccgagcgggaaggtttcctcagggcgctcctggacgccacccggggacaggtggccctggagtagcatggaggcgatgcttccgctctttgaacccaaaggccgggtcctcctggtggacggccaccacctggcctaccgcaccttcttcgccctgaagggcctcaccacgagccggggcgaaccggtgcaggcggtctacggcttcgccaagagcctcctcaaggccctgaaggaggacgggtacaaggccgtcttcgtggtctttgacgccaaggccccctccttccgccacgaggcctacgaggcctacaaggcggggagggccccgacccccgaggacttcccccggcagctcgccctcatcaaggagctggtggacctcctggggtttacccgcctcgaggtccccggctacgaggcggacgacgttctcgccaccctggccaagaaggcggaaaaggaggggtacgaggtgcgcatcctcaccgccgaccgcgacctctaccaactcgtctccgaccgcgtcgccgtcctccaccccgagggccacctcatcaccccggagtggctttgggagaagtacggcctcaggccggagcagtgggtggacttccgcgccctcgtgggggacccctccgacaacctccccggggtcaagggcatcggggagaagaccgccctcaagctcctcaaggagtggggaagcctggaaaacctcctcaagaacctggaccgggtaaagccagaaaacgtccgggagaagatcaaggcccacctggaagacctcaggctctccttggagctctcccgggtgcgcaccgacctccccctggaggtggacctcgcccaggggcgggagcccgaccgggaggggcttagggccttcctggagaggctggagttcggcagcctcctccacgagttcggcctcctggaggcccccgcccccctggaggaggccccctggcccccgccggaaggggccttcgtgggcttcgtcctctcccgccccgagcccatgtgggcggagcttaaagccctggccgcctgcagggacggccgggtgcaccgggcagcagaccccttggcggggctaaaggacctcaaggaggtccggggcctcctcgccaaggacctcgccgtcttggcctcgagggaggggctagacctcgtgcccggggacgaccccatgctcctcgcctacctcctggacccctccaacaccacccccgagggggtggcgcggcgctacgggggggagtggacggaggacgccgcccaccgggccctcctctcggagaggctccatcggaacctccttaagcgcctcgagggggaggagaagctcctttggctctaccacgaggtggaaaagcccctctcccgggtcctggcccacatggaggccaccggggtacggcgggacgtggcctaccttcaggccctttccctggagcttgcggaggagatccgccgcctcgaggaggaggtcttccgcttggcgggccaccccttcaacctcaactcccgggaccagctggaaagggtgctctttgacgagcttaggcttcccgccttggggaagacgcaaaagacaggcaagcgctccaccagcgccgcggtgctggaggccctacgggaggcccaccccatcgtggagaagatcctccagcaccggcatctcaccaagctcaagaacacctacgtggaccccctcccaagcctcgtccacccgaggacgggccgcctccacacccgcttcaaccagacggccacggccacggggaggcttagtagctccgaccccaacctgcagaacatccccgtccgcacccccttgggccagaggatccgccgggccttcgtggccgaggcgggttgggcgttggtggccctggactatagccagatagagctccgcgtcctcgcccacctctccggggacgaaaacctgatcagggtcttccaggaggggaaggacatccacacccagaccgcaagctggatgttcggcgtccccccggaggccgtggaccccctgatgcgccgggcggccaagacggtgaacttcggcgtcctctacggcatgtccgcccataggctctcccaggagcttgccatcccctacgaggaggcggtggcctttatagagcgctacttccaaagcttccccaaggtgcgggcctggatagaaaagaccctggaggaggggaggaagcggggctacgtggaaaccctcttcggaagaaggcgctacgtgcccgacctcaacgcccgggtgaagagcgtcagggaggccgcggagcgcatggccttcaacatgcccgtccagggcaccgccgccgacctcatgaagctcgccatggtgaagctcttcccccgcctccgggagatgggggcccgcatgctcctccaggtccacgacgagctcctcctggaggccccccaagcgcgggccgaggaggtggcggctttggccaaggaggccatggagaaggcctatcccctcgccgtgcccctggaggtggaggtggggatgggggaggactggctttccgccaagggttaggggggccctgccgtttagaggaagttcaaggggttgtccctcagaaacgcctccaggggaacgccctctgggcctaccaggaggcctttagccccaaaggtgcgggtgaaggcttccaggccctggg

SEQ ID NO: 3496 - DNA, 3221 bp, Artificial Sequence
  Description of Artificial Sequence: Synthetic DNA sequence of Thermus thermophilus DNA Polymerase E539I
tctagaggaagcatgagcctcaccctggcagacaaggtggtctacgaggaggagatccagaaaagccgcttcatcgccaaggcggcccccgtggcctcggaggaggaggccttggcgtttttggccgagaaccgggagcctgaggccacccacaacggccacgcctacaagatcggcctcctctaccgcttctctgacgacggggagccctcgggcaccgcaggcaggcccatcctccacgccatagaggcccagggcctggaccgggtggcggtcctggtggtgcgctacttcggcggggtgaagctcggggccggggggcttgtgcgggcctacgggggggtggcggcggaggccttaaggcgggcgcccaaggtccccttggtggagcgggtggggctcgccttcctcgtgcccttcgccgaggtgggccgggtctacgccctcctggaggcccgcgcccctgaaggccgaggagacctacaccccggaggcgtgcgcttcgccctcctcctccccaagcccgagcgggaaggtttcctcagggcgctcctggacgccacccggggacaggtggccctggagtagcatggaggcgatgcttccgctctttgaacccaaaggccgggtcctcctggtggacggccaccacctggcctaccgcaccttcttcgccctgaagggcctcaccacgagccggggcgaaccggtgcaggcggtctacggcttcgccaagagcctcctcaaggccctgaaggaggacgggtacaaggccgtcttcgtggtctttgacgccaaggccccctccttccgccacgaggcctacgaggcctacaaggcggggagggccccgacccccgaggacttcccccggcagctcgccctcatcaaggagctggtggacctcctggggtttacccgcctcgaggtccccggctacgaggcggacgacgttctcgccaccctggccaagaaggcggaaaaggaggggtacgaggtgcgcatcctcaccgccgaccgcgacctctaccaactcgtctccgaccgcgtcgccgtcctccaccccgagggccacctcatcaccccggagtggctttgggagaagtacggcctcaggccggagcagtgggtggacttccgcgccctcgtgggggacccctccgacaacctccccggggtcaagggcatcggggagaagaccgccctcaagctcctcaaggagtggggaagcctggaaaacctcctcaagaacctggaccgggtaaagccagaaaacgtccgggagaagatcaaggcccacctggaagacctcaggctctccttggagctctcccgggtgcgcaccgacctccccctggaggtggacctcgcccaggggcgggagcccgaccgggaggggcttagggccttcctggagaggctggagttcggcagcctcctccacgagttcggcctcctggaggcccccgcccccctggaggaggccccctggcccccgccggaaggggccttcgtgggcttcgtcctctcccgccccgagcccatgtgggcggagcttaaagccctggccgcctgcagggacggccgggtgcaccgggcagcagaccccttggcggggctaaaggacctcaaggaggtccggggcctcctcgccaaggacctcgccgtcttggcctcgagggaggggctagacctcgtgcccggggacgaccccatgctcctcgcctacctcctggacccctccaacaccacccccgagggggtggcgcggcgctacgggggggagtggacggaggacgccgcccaccgggccctcctctcggagaggctccatcggaacctccttaagcgcctcgagggggaggagaagctcctttggctctaccacgaggtggaaaagcccctctcccgggtcctggcccacatggaggccaccggggtacggcgggacgtggcctaccttcaggccctttccctggagcttgcggaggagatccgccgcctcgaggaggaggtcttccgcttggcgggccaccccttcaacctcaactcccgggaccagctggaaagggtgctctttgacgagcttaggcttcccgccttggggaagacgcaaaagacaggcaagcgctccaccagcgccgcggtgctggaggccctacgggaggcccaccccatcgtggagaagatcctccagcaccggattctcaccaagctcaagaacacctacgtggaccccctcccaagcctcgtccacccgaggacgggccgcctccacacccgcttcaaccagacggccacggccacggggaggcttagtagctccgaccccaacctgcagaacatccccgtccgcacccccttgggccagaggatccgccgggccttcgtggccgaggcgggttgggcgttggtggccctggactatagccagatagagctccgcgtcctcgcccacctctccggggacgaaaacctgatcagggtcttccaggaggggaaggacatccacacccagaccgcaagctggatgttcggcgtccccccggaggccgtggaccccctgatgcgccgggcggccaagacggtgaacttcggcgtcctctacggcatgtccgcccataggctctcccaggagcttgccatcccctacgaggaggcggtggcctttatagagcgctacttccaaagcttccccaaggtgcgggcctggatagaaaagaccctggaggaggggaggaagcggggctacgtggaaaccctcttcggaagaaggcgctacgtgcccgacctcaacgcccgggtgaagagcgtcagggaggccgcggagcgcatggccttcaacatgcccgtccagggcaccgccgccgacctcatgaagctcgccatggtgaagctcttcccccgcctccgggagatgggggcccgcatgctcctccaggtccacgacgagctcctcctggaggccccccaagcgcgggccgaggaggtggcggctttggccaaggaggccatggagaaggcctatcccctcgccgtgcccctggaggtggaggtggggatgggggaggactggctttccgccaagggttaggggggccctgccgtttagaggaagttcaaggggttgtccctcagaaacgcctccaggggaacgccctctgggcctaccaggaggcctttagccccaaaggtgcgggtgaaggcttccaggccctggg

SEQ ID NO: 3497 - DNA, 3221 bp, Artificial Sequence
  Description of Artificial Sequence: Synthetic DNA sequence of Thermus thermophilus DNA Polymerase E539L
tctagaggaagcatgagcctcaccctggcagacaaggtggtctacgaggaggagatccagaaaagccgcttcatcgccaaggcggcccccgtggcctcggaggaggaggccttggcgtttttggccgagaaccgggagcctgaggccacccacaacggccacgcctacaagatcggcctcctctaccgcttctctgacgacggggagccctcgggcaccgcaggcaggcccatcctccacgccatagaggcccagggcctggaccgggtggcggtcctggtggtgcgctacttcggcggggtgaagctcggggccggggggcttgtgcgggcctacgggggggtggcggcggaggccttaaggcgggcgcccaaggtccccttggtggagcgggtggggctcgccttcctcgtgcccttcgccgaggtgggccgggtctacgccctcctggaggcccgcgcccctgaaggccgaggagacctacaccccggaggcgtgcgcttcgccctcctcctccccaagcccgagcgggaaggtttcctcagggcgctcctggacgccacccggggacaggtggccctggagtagcatggaggcgatgcttccgctctttgaacccaaaggccgggtcctcctggtggacggccaccacctggcctaccgcaccttcttcgccctgaagggcctcaccacgagccggggcgaaccggtgcaggcggtctacggcttcgccaagagcctcctcaaggccctgaaggaggacgggtacaaggccgtcttcgtggtctttgacgccaaggccccctccttccgccacgaggcctacgaggcctacaaggcggggagggccccgacccccgaggacttcccccggcagctcgccctcatcaaggagctggtggacctcctggggtttacccgcctcgaggtccccggctacgaggcggacgacgttctcgccaccctggccaagaaggcggaaaaggaggggtacgaggtgcgcatcctcaccgccgaccgcgacctctaccaactcgtctccgaccgcgtcgccgtcctccaccccgagggccacctcatcaccccggagtggctttgggagaagtacggcctcaggccggagcagtgggtggacttccgcgccctcgtgggggacccctccgacaacctccccggggtcaagggcatcggggagaagaccgccctcaagctcctcaaggagtggggaagcctggaaaacctcctcaagaacctggaccgggtaaagccagaaaacgtccgggagaagatcaaggcccacctggaagacctcaggctctccttggagctctcccgggtgcgcaccgacctccccctggaggtggacctcgcccaggggcgggagcccgaccgggaggggcttagggccttcctggagaggctggagttcggcagcctcctccacgagttcggcctcctggaggcccccgcccccctggaggaggccccctggcccccgccggaaggggccttcgtgggcttcgtcctctcccgccccgagcccatgtgggcggagcttaaagccctggccgcctgcagggacggccgggtgcaccgggcagcagaccccttggcggggctaaaggacctcaaggaggtccggggcctcctcgccaaggacctcgccgtcttggcctcgagggaggggctagacctcgtgcccggggacgaccccatgctcctcgcctacctcctggacccctccaacaccacccccgagggggtggcgcggcgctacgggggggagtggacggaggacgccgcccaccgggccctcctctcggagaggctccatcggaacctccttaagcgcctcgagggggaggagaagctcctttggctctaccacgaggtggaaaagcccctctcccgggtcctggcccacatggaggccaccggggtacggcgggacgtggcctaccttcaggccctttccctggagcttgcggaggagatccgccgcctcgaggaggaggtcttccgcttggcgggccaccccttcaacctcaactcccgggaccagctggaaagggtgctctttgacgagcttaggcttcccgccttggggaagacgcaaaagacaggcaagcgctccaccagcgccgcggtgctggaggccctacgggaggcccaccccatcgtggagaagatcctccagcaccggcttctcaccaagctcaagaacacctacgtggaccccctcccaagcctcgtccacccgaggacgggccgcctccacacccgcttcaaccagacggccacggccacggggaggcttagtagctccgaccccaacctgcagaacatccccgtccgcacccccttgggccagaggatccgccgggccttcgtggccgaggcgggttgggcgttggtggccctggactatagccagatagagctccgcgtcctcgcccacctctccggggacgaaaacctgatcagggtcttccaggaggggaaggacatccacacccagaccgcaagctggatgttcggcgtccccccggaggccgtggaccccctgatgcgccgggcggccaagacggtgaacttcggcgtcctctacggcatgtccgcccataggctctcccaggagcttgccatcccctacgaggaggcggtggcctttatagagcgctacttccaaagcttccccaaggtgcgggcctggatagaaaagaccctggaggaggggaggaagcggggctacgtggaaaccctcttcggaagaaggcgctacgtgcccgacctcaacgcccgggtgaagagcgtcagggaggccgcggagcgcatggccttcaacatgcccgtccagggcaccgccgccgacctcatgaagctcgccatggtgaagctcttcccccgcctccgggagatgggggcccgcatgctcctccaggtccacgacgagctcctcctggaggccccccaagcgcgggccgaggaggtggcggctttggccaaggaggccatggagaaggcctatcccctcgccgtgcccctggaggtggaggtggggatgggggaggactggctttccgccaagggttaggggggccctgccgtttagaggaagttcaaggggttgtccctcagaaacgcctccaggggaacgccctctgggcctaccaggaggcctttagccccaaaggtgcgggtgaaggcttccaggccctggg

SEQ ID NO: 3498 - DNA, 3221 bp, Artificial Sequence
  Description of Artificial Sequence: Synthetic DNA sequence of Thermus thermophilus DNA Polymerase E539K
tctagaggaagcatgagcctcaccctggcagacaaggtggtctacgaggaggagatccagaaaagccgcttcatcgccaaggcggcccccgtggcctcggaggaggaggccttggcgtttttggccgagaaccgggagcctgaggccacccacaacggccacgcctacaagatcggcctcctctaccgcttctctgacgacggggagccctcgggcaccgcaggcaggcccatcctccacgccatagaggcccagggcctggaccgggtggcggtcctggtggtgcgctacttcggcggggtgaagctcggggccggggggcttgtgcgggcctacgggggggtggcggcggaggccttaaggcgggcgcccaaggtccccttggtggagcgggtggggctcgccttcctcgtgcccttcgccgaggtgggccgggtctacgccctcctggaggcccgcgcccctgaaggccgaggagacctacaccccggaggcgtgcgcttcgccctcctcctccccaagcccgagcgggaaggtttcctcagggcgctcctggacgccacccggggacaggtggccctggagtagcatggaggcgatgcttccgctctttgaacccaaaggccgggtcctcctggtggacggccaccacctggcctaccgcaccttcttcgccctgaagggcctcaccacgagccggggcgaaccggtgcaggcggtctacggcttcgccaagagcctcctcaaggccctgaaggaggacgggtacaaggccgtcttcgtggtctttgacgccaaggccccctccttccgccacgaggcctacgaggcctacaaggcggggagggccccgacccccgaggacttcccccggcagctcgccctcatcaaggagctggtggacctcctggggtttacccgcctcgaggtccccggctacgaggcggacgacgttctcgccaccctggccaagaaggcggaaaaggaggggtacgaggtgcgcatcctcaccgccgaccgcgacctctaccaactcgtctccgaccgcgtcgccgtcctccaccccgagggccacctcatcaccccggagtggctttgggagaagtacggcctcaggccggagcagtgggtggacttccgcgccctcgtgggggacccctccgacaacctccccggggtcaagggcatcggggagaagaccgccctcaagctcctcaaggagtggggaagcctggaaaacctcctcaagaacctggaccgggtaaagccagaaaacgtccgggagaagatcaaggcccacctggaagacctcaggctctccttggagctctcccgggtgcgcaccgacctccccctggaggtggacctcgcccaggggcgggagcccgaccgggaggggcttagggccttcctggagaggctggagttcggcagcctcctccacgagttcggcctcctggaggcccccgcccccctggaggaggccccctggcccccgccggaaggggccttcgtgggcttcgtcctctcccgccccgagcccatgtgggcggagcttaaagccctggccgcctgcagggacggccgggtgcaccgggcagcagaccccttggcggggctaaaggacctcaaggaggtccggggcctcctcgccaaggacctcgccgtcttggcctcgagggaggggctagacctcgtgcccggggacgaccccatgctcctcgcctacctcctggacccctccaacaccacccccgagggggtggcgcggcgctacgggggggagtggacggaggacgccgcccaccgggccctcctctcggagaggctccatcggaacctccttaagcgcctcgagggggaggagaagctcctttggctctaccacgaggtggaaaagcccctctcccgggtcctggcccacatggaggccaccggggtacggcgggacgtggcctaccttcaggccctttccctggagcttgcggaggagatccgccgcctcgaggaggaggtcttccgcttggcgggccaccccttcaacctcaactcccgggaccagctggaaagggtgctctttgacgagcttaggcttcccgccttggggaagacgcaaaagacaggcaagcgctccaccagcgccgcggtgctggaggccctacgggaggcccaccccatcgtggagaagatcctccagcaccggaaactcaccaagctcaagaacacctacgtggaccccctcccaagcctcgtccacccgaggacgggccgcctccacacccgcttcaaccagacggccacggccacggggaggcttagtagctccgaccccaacctgcagaacatccccgtccgcacccccttgggccagaggatccgccgggccttcgtggccgaggcgggttgggcgttggtggccctggactatagccagatagagctccgcgtcctcgcccacctctccggggacgaaaacctgatcagggtcttccaggaggggaaggacatccacacccagaccgcaagctggatgttcggcgtccccccggaggccgtggaccccctgatgcgccgggcggccaagacggtgaacttcggcgtcctctacggcatgtccgcccataggctctcccaggagcttgccatcccctacgaggaggcggtggcctttatagagcgctacttccaaagcttccccaaggtgcgggcctggatagaaaagaccctggaggaggggaggaagcggggctacgtggaaaccctcttcggaagaaggcgctacgtgcccgacctcaacgcccgggtgaagagcgtcagggaggccgcggagcgcatggccttcaacatgcccgtccagggcaccgccgccgacctcatgaagctcgccatggtgaagctcttcccccgcctccgggagatgggggcccgcatgctcctccaggtccacgacgagctcctcctggaggccccccaagcgcgggccgaggaggtggcggctttggccaaggaggccatggagaaggcctatcccctcgccgtgcccctggaggtggaggtggggatgggggaggactggctttccgccaagggttaggggggccctgccgtttagaggaagttcaaggggttgtccctcagaaacgcctccaggggaacgccctctgggcctaccaggaggcctttagccccaaaggtgcgggtgaaggcttccaggccctggg

SEQ ID NO: 3499 - DNA, 3221 bp, Artificial Sequence
  Description of Artificial Sequence: Synthetic DNA sequence of Thermus thermophilus DNA Polymerase E539M
tctagaggaagcatgagcctcaccctggcagacaaggtggtctacgaggaggagatccagaaaagccgcttcatcgccaaggcggcccccgtggcctcggaggaggaggccttggcgtttttggccgagaaccgggagcctgaggccacccacaacggccacgcctacaagatcggcctcctctaccgcttctctgacgacggggagccctcgggcaccgcaggcaggcccatcctccacgccatagaggcccagggcctggaccgggtggcggtcctggtggtgcgctacttcggcggggtgaagctcggggccggggggcttgtgcgggcctacgggggggtggcggcggaggccttaaggcgggcgcccaaggtccccttggtggagcgggtggggctcgccttcctcgtgcccttcgccgaggtgggccgggtctacgccctcctggaggcccgcgcccctgaaggccgaggagacctacaccccggaggcgtgcgcttcgccctcctcctccccaagcccgagcgggaaggtttcctcagggcgctcctggacgccacccggggacaggtggccctggagtagcatggaggcgatgcttccgctctttgaacccaaaggccgggtcctcctggtggacggccaccacctggcctaccgcaccttcttcgccctgaagggcctcaccacgagccggggcgaaccggtgcaggcggtctacggcttcgccaagagcctcctcaaggccctgaaggaggacgggtacaaggccgtcttcgtggtctttgacgccaaggccccctccttccgccacgaggcctacgaggcctacaaggcggggagggccccgacccccgaggacttcccccggcagctcgccctcatcaaggagctggtggacctcctggggtttacccgcctcgaggtccccggctacgaggcggacgacgttctcgccaccctggccaagaaggcggaaaaggaggggtacgaggtgcgcatcctcaccgccgaccgcgacctctaccaactcgtctccgaccgcgtcgccgtcctccaccccgagggccacctcatcaccccggagtggctttgggagaagtacggcctcaggccggagcagtgggtggacttccgcgccctcgtgggggacccctccgacaacctccccggggtcaagggcatcggggagaagaccgccctcaagctcctcaaggagtggggaagcctggaaaacctcctcaagaacctggaccgggtaaagccagaaaacgtccgggagaagatcaaggcccacctggaagacctcaggctctccttggagctctcccgggtgcgcaccgacctccccctggaggtggacctcgcccaggggcgggagcccgaccgggaggggcttagggccttcctggagaggctggagttcggcagcctcctccacgagttcggcctcctggaggcccccgcccccctggaggaggccccctggcccccgccggaaggggccttcgtgggcttcgtcctctcccgccccgagcccatgtgggcggagcttaaagccctggccgcctgcagggacggccgggtgcaccgggcagcagaccccttggcggggctaaaggacctcaaggaggtccggggcctcctcgccaaggacctcgccgtcttggcctcgagggaggggctagacctcgtgcccggggacgaccccatgctcctcgcctacctcctggacccctccaacaccacccccgagggggtggcgcggcgctacgggggggagtggacggaggacgccgcccaccgggccctcctctcggagaggctccatcggaacctccttaagcgcctcgagggggaggagaagctcctttggctctaccacgaggtggaaaagcccctctcccgggtcctggcccacatggaggccaccggggtacggcgggacgtggcctaccttcaggccctttccctggagcttgcggaggagatccgccgcctcgaggaggaggtcttccgcttggcgggccaccccttcaacctcaactcccgggaccagctggaaagggtgctctttgacgagcttaggcttcccgccttggggaagacgcaaaagacaggcaagcgctccaccagcgccgcggtgctggaggccctacgggaggcccaccccatcgtggagaagatcctccagcaccggatgctcaccaagctcaagaacacctacgtggaccccctcccaagcctcgtccacccgaggacgggccgcctccacacccgcttcaaccagacggccacggccacggggaggcttagtagctccgaccccaacctgcagaacatccccgtccgcacccccttgggccagaggatccgccgggccttcgtggccgaggcgggttgggcgttggtggccctggactatagccagatagagctccgcgtcctcgcccacctctccggggacgaaaacctgatcagggtcttccaggaggggaaggacatccacacccagaccgcaagctggatgttcggcgtccccccggaggccgtggaccccctgatgcgccgggcggccaagacggtgaacttcggcgtcctctacggcatgtccgcccataggctctcccaggagcttgccatcccctacgaggaggcggtggcctttatagagcgctacttccaaagcttccccaaggtgcgggcctggatagaaaagaccctggaggaggggaggaagcggggctacgtggaaaccctcttcggaagaaggcgctacgtgcccgacctcaacgcccgggtgaagagcgtcagggaggccgcggagcgcatggccttcaacatgcccgtccagggcaccgccgccgacctcatgaagctcgccatggtgaagctcttcccccgcctccgggagatgggggcccgcatgctcctccaggtccacgacgagctcctcctggaggccccccaagcgcgggccgaggaggtggcggctttggccaaggaggccatggagaaggcctatcccctcgccgtgcccctggaggtggaggtggggatgggggaggactggctttccgccaagggttaggggggccctgccgtttagaggaagttcaaggggttgtccctcagaaacgcctccaggggaacgccctctgggcctaccaggaggcctttagccccaaaggtgcgggtgaaggcttccaggccctggg

SEQ ID NO: 3500 - DNA, 3221 bp, Artificial Sequence
  Description of Artificial Sequence: Synthetic DNA sequence of Thermus thermophilus DNA Polymerase E539F
tctagaggaagcatgagcctcaccctggcagacaaggtggtctacgaggaggagatccagaaaagccgcttcatcgccaaggcggcccccgtggcctcggaggaggaggccttggcgtttttggccgagaaccgggagcctgaggccacccacaacggccacgcctacaagatcggcctcctctaccgcttctctgacgacggggagccctcgggcaccgcaggcaggcccatcctccacgccatagaggcccagggcctggaccgggtggcggtcctggtggtgcgctacttcggcggggtgaagctcggggccggggggcttgtgcgggcctacgggggggtggcggcggaggccttaaggcgggcgcccaaggtccccttggtggagcgggtggggctcgccttcctcgtgcccttcgccgaggtgggccgggtctacgccctcctggaggcccgcgcccctgaaggccgaggagacctacaccccggaggcgtgcgcttcgccctcctcctccccaagcccgagcgggaaggtttcctcagggcgctcctggacgccacccggggacaggtggccctggagtagcatggaggcgatgcttccgctctttgaacccaaaggccgggtcctcctggtggacggccaccacctggcctaccgcaccttcttcgccctgaagggcctcaccacgagccggggcgaaccggtgcaggcggtctacggcttcgccaagagcctcctcaaggccctgaaggaggacgggtacaaggccgtcttcgtggtctttgacgccaaggccccctccttccgccacgaggcctacgaggcctacaaggcggggagggccccgacccccgaggacttcccccggcagctcgccctcatcaaggagctggtggacctcctggggtttacccgcctcgaggtccccggctacgaggcggacgacgttctcgccaccctggccaagaaggcggaaaaggaggggtacgaggtgcgcatcctcaccgccgaccgcgacctctaccaactcgtctccgaccgcgtcgccgtcctccaccccgagggccacctcatcaccccggagtggctttgggagaagtacggcctcaggccggagcagtgggtggacttccgcgccctcgtgggggacccctccgacaacctccccggggtcaagggcatcggggagaagaccgccctcaagctcctcaaggagtggggaagcctggaaaacctcctcaagaacctggaccgggtaaagccagaaaacgtccgggagaagatcaaggcccacctggaagacctcaggctctccttggagctctcccgggtgcgcaccgacctccccctggaggtggacctcgcccaggggcgggagcccgaccgggaggggcttagggccttcctggagaggctggagttcggcagcctcctccacgagttcggcctcctggaggcccccgcccccctggaggaggccccctggcccccgccggaaggggccttcgtgggcttcgtcctctcccgccccgagcccatgtgggcggagcttaaagccctggccgcctgcagggacggccgggtgcaccgggcagcagaccccttggcggggctaaaggacctcaaggaggtccggggcctcctcgccaaggacctcgccgtcttggcctcgagggaggggctagacctcgtgcccggggacgaccccatgctcctcgcctacctcctggacccctccaacaccacccccgagggggtggcgcggcgctacgggggggagtggacggaggacgccgcccaccgggccctcctctcggagaggctccatcggaacctccttaagcgcctcgagggggaggagaagctcctttggctctaccacgaggtggaaaagcccctctcccgggtcctggcccacatggaggccaccggggtacggcgggacgtggcctaccttcaggccctttccctggagcttgcggaggagatccgccgcctcgaggaggaggtcttccgcttggcgggccaccccttcaacctcaactcccgggaccagctggaaagggtgctctttgacgagcttaggcttcccgccttggggaagacgcaaaagacaggcaagcgctccaccagcgccgcggtgctggaggccctacgggaggcccaccccatcgtggagaagatcctccagcaccggtttctcaccaagctcaagaacacctacgtggaccccctcccaagcctcgtccacccgaggacgggccgcctccacacccgcttcaaccagacggccacggccacggggaggcttagtagctccgaccccaacctgcagaacatccccgtccgcacccccttgggccagaggatccgccgggccttcgtggccgaggcgggttgggcgttggtggccctggactatagccagatagagctccgcgtcctcgcccacctctccggggacgaaaacctgatcagggtcttccaggaggggaaggacatccacacccagaccgcaagctggatgttcggcgtccccccggaggccgtggaccccctgatgcgccgggcggccaagacggtgaacttcggcgtcctctacggcatgtccgcccataggctctcccaggagcttgccatcccctacgaggaggcggtggcctttatagagcgctacttccaaagcttccccaaggtgcgggcctggatagaaaagaccctggaggaggggaggaagcggggctacgtggaaaccctcttcggaagaaggcgctacgtgcccgacctcaacgcccgggtgaagagcgtcagggaggccgcggagcgcatggccttcaacatgcccgtccagggcaccgccgccgacctcatgaagctcgccatggtgaagctcttcccccgcctccgggagatgggggcccgcatgctcctccaggtccacgacgagctcctcctggaggccccccaagcgcgggccgaggaggtggcggctttggccaaggaggccatggagaaggcctatcccctcgccgtgcccctggaggtggaggtggggatgggggaggactggctttccgccaagggttaggggggccctgccgtttagaggaagttcaaggggttgtccctcagaaacgcctccaggggaacgccctctgggcctaccaggaggcctttagccccaaaggtgcgggtgaaggcttccaggccctggg

SEQ ID NO: 3501 - DNA, 3221 bp, Artificial Sequence
  Description of Artificial Sequence: Synthetic DNA sequence of Thermus thermophilus DNA Polymerase E539P
tctagaggaagcatgagcctcaccctggcagacaaggtggtctacgaggaggagatccagaaaagccgcttcatcgccaaggcggcccccgtggcctcggaggaggaggccttggcgtttttggccgagaaccgggagcctgaggccacccacaacggccacgcctacaagatcggcctcctctaccgcttctctgacgacggggagccctcgggcaccgcaggcaggcccatcctccacgccatagaggcccagggcctggaccgggtggcggtcctggtggtgcgctacttcggcggggtgaagctcggggccggggggcttgtgcgggcctacgggggggtggcggcggaggccttaaggcgggcgcccaaggtccccttggtggagcgggtggggctcgccttcctcgtgcccttcgccgaggtgggccgggtctacgccctcctggaggcccgcgcccctgaaggccgaggagacctacaccccggaggcgtgcgcttcgccctcctcctccccaagcccgagcgggaaggtttcctcagggcgctcctggacgccacccggggacaggtggccctggagtagcatggaggcgatgcttccgctctttgaacccaaaggccgggtcctcctggtggacggccaccacctggcctaccgcaccttcttcgccctgaagggcctcaccacgagccggggcgaaccggtgcaggcggtctacggcttcgccaagagcctcctcaaggccctgaaggaggacgggtacaaggccgtcttcgtggtctttgacgccaaggccccctccttccgccacgaggcctacgaggcctacaaggcggggagggccccgacccccgaggacttcccccggcagctcgccctcatcaaggagctggtggacctcctggggtttacccgcctcgaggtccccggctacgaggcggacgacgttctcgccaccctggccaagaaggcggaaaaggaggggtacgaggtgcgcatcctcaccgccgaccgcgacctctaccaactcgtctccgaccgcgtcgccgtcctccaccccgagggccacctcatcaccccggagtggctttgggagaagtacggcctcaggccggagcagtgggtggacttccgcgccctcgtgggggacccctccgacaacctccccggggtcaagggcatcggggagaagaccgccctcaagctcctcaaggagtggggaagcctggaaaacctcctcaagaacctggaccgggtaaagccagaaaacgtccgggagaagatcaaggcccacctggaagacctcaggctctccttggagctctcccgggtgcgcaccgacctccccctggaggtggacctcgcccaggggcgggagcccgaccgggaggggcttagggccttcctggagaggctggagttcggcagcctcctccacgagttcggcctcctggaggcccccgcccccctggaggaggccccctggcccccgccggaaggggccttcgtgggcttcgtcctctcccgccccgagcccatgtgggcggagcttaaagccctggccgcctgcagggacggccgggtgcaccgggcagcagaccccttggcggggctaaaggacctcaaggaggtccggggcctcctcgccaaggacctcgccgtcttggcctcgagggaggggctagacctcgtgcccggggacgaccccatgctcctcgcctacctcctggacccctccaacaccacccccgagggggtggcgcggcgctacgggggggagtggacggaggacgccgcccaccgggccctcctctcggagaggctccatcggaacctccttaagcgcctcgagggggaggagaagctcctttggctctaccacgaggtggaaaagcccctctcccgggtcctggcccacatggaggccaccggggtacggcgggacgtggcctaccttcaggccctttccctggagcttgcggaggagatccgccgcctcgaggaggaggtcttccgcttggcgggccaccccttcaacctcaactcccgggaccagctggaaagggtgctctttgacgagcttaggcttcccgccttggggaagacgcaaaagacaggcaagcgctccaccagcgccgcggtgctggaggccctacgggaggcccaccccatcgtggagaagatcctccagcaccggcctctcaccaagctcaagaacacctacgtggaccccctcccaagcctcgtccacccgaggacgggccgcctccacacccgcttcaaccagacggccacggccacggggaggcttagtagctccgaccccaacctgcagaacatccccgtccgcacccccttgggccagaggatccgccgggccttcgtggccgaggcgggttgggcgttggtggccctggactatagccagatagagctccgcgtcctcgcccacctctccggggacgaaaacctgatcagggtcttccaggaggggaaggacatccacacccagaccgcaagctggatgttcggcgtccccccggaggccgtggaccccctgatgcgccgggcggccaagacggtgaacttcggcgtcctctacggcatgtccgcccataggctctcccaggagcttgccatcccctacgaggaggcggtggcctttatagagcgctacttccaaagcttccccaaggtgcgggcctggatagaaaagaccctggaggaggggaggaagcggggctacgtggaaaccctcttcggaagaaggcgctacgtgcccgacctcaacgcccgggtgaagagcgtcagggaggccgcggagcgcatggccttcaacatgcccgtccagggcaccgccgccgacctcatgaagctcgccatggtgaagctcttcccccgcctccgggagatgggggcccgcatgctcctccaggtccacgacgagctcctcctggaggccccccaagcgcgggccgaggaggtggcggctttggccaaggaggccatggagaaggcctatcccctcgccgtgcccctggaggtggaggtggggatgggggaggactggctttccgccaagggttaggggggccctgccgtttagaggaagttcaaggggttgtccctcagaaacgcctccaggggaacgccctctgggcctaccaggaggcctttagccccaaaggtgcgggtgaaggcttccaggccctggg

SEQ ID NO: 3502 - DNA, 3221 bp, Artificial Sequence
  Description of Artificial Sequence: Synthetic DNA sequence of Thermus thermophilus DNA Polymerase E539S
tctagaggaagcatgagcctcaccctggcagacaaggtggtctacgaggaggagatccagaaaagccgcttcatcgccaaggcggcccccgtggcctcggaggaggaggccttggcgtttttggccgagaaccgggagcctgaggccacccacaacggccacgcctacaagatcggcctcctctaccgcttctctgacgacggggagccctcgggcaccgcaggcaggcccatcctccacgccatagaggcccagggcctggaccgggtggcggtcctggtggtgcgctacttcggcggggtgaagctcggggccggggggcttgtgcgggcctacgggggggtggcggcggaggccttaaggcgggcgcccaaggtccccttggtggagcgggtggggctcgccttcctcgtgcccttcgccgaggtgggccgggtctacgccctcctggaggcccgcgcccctgaaggccgaggagacctacaccccggaggcgtgcgcttcgccctcctcctccccaagcccgagcgggaaggtttcctcagggcgctcctggacgccacccggggacaggtggccctggagtagcatggaggcgatgcttccgctctttgaacccaaaggccgggtcctcctggtggacggccaccacctggcctaccgcaccttcttcgccctgaagggcctcaccacgagccggggcgaaccggtgcaggcggtctacggcttcgccaagagcctcctcaaggccctgaaggaggacgggtacaaggccgtcttcgtggtctttgacgccaaggccccctccttccgccacgaggcctacgaggcctacaaggcggggagggccccgacccccgaggacttcccccggcagctcgccctcatcaaggagctggtggacctcctggggtttacccgcctcgaggtccccggctacgaggcggacgacgttctcgccaccctggccaagaaggcggaaaaggaggggtacgaggtgcgcatcctcaccgccgaccgcgacctctaccaactcgtctccgaccgcgtcgccgtcctccaccccgagggccacctcatcaccccggagtggctttgggagaagtacggcctcaggccggagcagtgggtggacttccgcgccctcgtgggggacccctccgacaacctccccggggtcaagggcatcggggagaagaccgccctcaagctcctcaaggagtggggaagcctggaaaacctcctcaagaacctggaccgggtaaagccagaaaacgtccgggagaagatcaaggcccacctggaagacctcaggctctccttggagctctcccgggtgcgcaccgacctccccctggaggtggacctcgcccaggggcgggagcccgaccgggaggggcttagggccttcctggagaggctggagttcggcagcctcctccacgagttcggcctcctggaggcccccgcccccctggaggaggccccctggcccccgccggaaggggccttcgtgggcttcgtcctctcccgccccgagcccatgtgggcggagcttaaagccctggccgcctgcagggacggccgggtgcaccgggcagcagaccccttggcggggctaaaggacctcaaggaggtccggggcctcctcgccaaggacctcgccgtcttggcctcgagggaggggctagacctcgtgcccggggacgaccccatgctcctcgcctacctcctggacccctccaacaccacccccgagggggtggcgcggcgctacgggggggagtggacggaggacgccgcccaccgggccctcctctcggagaggctccatcggaacctccttaagcgcctcgagggggaggagaagctcctttggctctaccacgaggtggaaaagcccctctcccgggtcctggcccacatggaggccaccggggtacggcgggacgtggcctaccttcaggccctttccctggagcttgcggaggagatccgccgcctcgaggaggaggtcttccgcttggcgggccaccccttcaacctcaactcccgggaccagctggaaagggtgctctttgacgagcttaggcttcccgccttggggaagacgcaaaagacaggcaagcgctccaccagcgccgcggtgctggaggccctacgggaggcccaccccatcgtggagaagatcctccagcaccggtctctcaccaagctcaagaacacctacgtggaccccctcccaagcctcgtccacccgaggacgggccgcctccacacccgcttcaaccagacggccacggccacggggaggcttagtagctccgaccccaacctgcagaacatccccgtccgcacccccttgggccagaggatccgccgggccttcgtggccgaggcgggttgggcgttggtggccctggactatagccagatagagctccgcgtcctcgcccacctctccggggacgaaaacctgatcagggtcttccaggaggggaaggacatccacacccagaccgcaagctggatgttcggcgtccccccggaggccgtggaccccctgatgcgccgggcggccaagacggtgaacttcggcgtcctctacggcatgtccgcccataggctctcccaggagcttgccatcccctacgaggaggcggtggcctttatagagcgctacttccaaagcttccccaaggtgcgggcctggatagaaaagaccctggaggaggggaggaagcggggctacgtggaaaccctcttcggaagaaggcgctacgtgcccgacctcaacgcccgggtgaagagcgtcagggaggccgcggagcgcatggccttcaacatgcccgtccagggcaccgccgccgacctcatgaagctcgccatggtgaagctcttcccccgcctccgggagatgggggcccgcatgctcctccaggtccacgacgagctcctcctggaggccccccaagcgcgggccgaggaggtggcggctttggccaaggaggccatggagaaggcctatcccctcgccgtgcccctggaggtggaggtggggatgggggaggactggctttccgccaagggttaggggggccctgccgtttagaggaagttcaaggggttgtccctcagaaacgcctccaggggaacgccctctgggcctaccaggaggcctttagccccaaaggtgcgggtgaaggcttccaggccctggg

SEQ ID NO: 3503 - DNA, 3221 bp, Artificial Sequence
  Description of Artificial Sequence: Synthetic DNA sequence of Thermus thermophilus DNA Polymerase E539T
tctagaggaagcatgagcctcaccctggcagacaaggtggtctacgaggaggagatccagaaaagccgcttcatcgccaaggcggcccccgtggcctcggaggaggaggccttggcgtttttggccgagaaccgggagcctgaggccacccacaacggccacgcctacaagatcggcctcctctaccgcttctctgacgacggggagccctcgggcaccgcaggcaggcccatcctccacgccatagaggcccagggcctggaccgggtggcggtcctggtggtgcgctacttcggcggggtgaagctcggggccggggggcttgtgcgggcctacgggggggtggcggcggaggccttaaggcgggcgcccaaggtccccttggtggagcgggtggggctcgccttcctcgtgcccttcgccgaggtgggccgggtctacgccctcctggaggcccgcgcccctgaaggccgaggagacctacaccccggaggcgtgcgcttcgccctcctcctccccaagcccgagcgggaaggtttcctcagggcgctcctggacgccacccggggacaggtggccctggagtagcatggaggcgatgcttccgctctttgaacccaaaggccgggtcctcctggtggacggccaccacctggcctaccgcaccttcttcgccctgaagggcctcaccacgagccggggcgaaccggtgcaggcggtctacggcttcgccaagagcctcctcaaggccctgaaggaggacgggtacaaggccgtcttcgtggtctttgacgccaaggccccctccttccgccacgaggcctacgaggcctacaaggcggggagggccccgacccccgaggacttcccccggcagctcgccctcatcaaggagctggtggacctcctggggtttacccgcctcgaggtccccggctacgaggcggacgacgttctcgccaccctggccaagaaggcggaaaaggaggggtacgaggtgcgcatcctcaccgccgaccgcgacctctaccaactcgtctccgaccgcgtcgccgtcctccaccccgagggccacctcatcaccccggagtggctttgggagaagtacggcctcaggccggagcagtgggtggacttccgcgccctcgtgggggacccctccgacaacctccccggggtcaagggcatcggggagaagaccgccctcaagctcctcaaggagtggggaagcctggaaaacctcctcaagaacctggaccgggtaaagccagaaaacgtccgggagaagatcaaggcccacctggaagacctcaggctctccttggagctctcccgggtgcgcaccgacctccccctggaggtggacctcgcccaggggcgggagcccgaccgggaggggcttagggccttcctggagaggctggagttcggcagcctcctccacgagttcggcctcctggaggcccccgcccccctggaggaggccccctggcccccgccggaaggggccttcgtgggcttcgtcctctcccgccccgagcccatgtgggcggagcttaaagccctggccgcctgcagggacggccgggtgcaccgggcagcagaccccttggcggggctaaaggacctcaaggaggtccggggcctcctcgccaaggacctcgccgtcttggcctcgagggaggggctagacctcgtgcccggggacgaccccatgctcctcgcctacctcctggacccctccaacaccacccccgagggggtggcgcggcgctacgggggggagtggacggaggacgccgcccaccgggccctcctctcggagaggctccatcggaacctccttaagcgcctcgagggggaggagaagctcctttggctctaccacgaggtggaaaagcccctctcccgggtcctggcccacatggaggccaccggggtacggcgggacgtggcctaccttcaggccctttccctggagcttgcggaggagatccgccgcctcgaggaggaggtcttccgcttggcgggccaccccttcaacctcaactcccgggaccagctggaaagggtgctctttgacgagcttaggcttcccgccttggggaagacgcaaaagacaggcaagcgctccaccagcgccgcggtgctggaggccctacgggaggcccaccccatcgtggagaagatcctccagcaccggactctcaccaagctcaagaacacctacgtggaccccctcccaagcctcgtccacccgaggacgggccgcctccacacccgcttcaaccagacggccacggccacggggaggcttagtagctccgaccccaacctgcagaacatccccgtccgcacccccttgggccagaggatccgccgggccttcgtggccgaggcgggttgggcgttggtggccctggactatagccagatagagctccgcgtcctcgcccacctctccggggacgaaaacctgatcagggtcttccaggaggggaaggacatccacacccagaccgcaagctggatgttcggcgtccccccggaggccgtggaccccctgatgcgccgggcggccaagacggtgaacttcggcgtcctctacggcatgtccgcccataggctctcccaggagcttgccatcccctacgaggaggcggtggcctttatagagcgctacttccaaagcttccccaaggtgcgggcctggatagaaaagaccctggaggaggggaggaagcggggctacgtggaaaccctcttcggaagaaggcgctacgtgcccgacctcaacgcccgggtgaagagcgtcagggaggccgcggagcgcatggccttcaacatgcccgtccagggcaccgccgccgacctcatgaagctcgccatggtgaagctcttcccccgcctccgggagatgggggcccgcatgctcctccaggtccacgacgagctcctcctggaggccccccaagcgcgggccgaggaggtggcggctttggccaaggaggccatggagaaggcctatcccctcgccgtgcccctggaggtggaggtggggatgggggaggactggctttccgccaagggttaggggggccctgccgtttagaggaagttcaaggggttgtccctcagaaacgcctccaggggaacgccctctgggcctaccaggaggcctttagccccaaaggtgcgggtgaaggcttccaggccctggg

SEQ ID NO: 3504 - DNA, 3221 bp, Artificial Sequence
  Description of Artificial Sequence: Synthetic DNA sequence of Thermus thermophilus DNA Polymerase E539W
tctagaggaagcatgagcctcaccctggcagacaaggtggtctacgaggaggagatccagaaaagccgcttcatcgccaaggcggcccccgtggcctcggaggaggaggccttggcgtttttggccgagaaccgggagcctgaggccacccacaacggccacgcctacaagatcggcctcctctaccgcttctctgacgacggggagccctcgggcaccgcaggcaggcccatcctccacgccatagaggcccagggcctggaccgggtggcggtcctggtggtgcgctacttcggcggggtgaagctcggggccggggggcttgtgcgggcctacgggggggtggcggcggaggccttaaggcgggcgcccaaggtccccttggtggagcgggtggggctcgccttcctcgtgcccttcgccgaggtgggccgggtctacgccctcctggaggcccgcgcccctgaaggccgaggagacctacaccccggaggcgtgcgcttcgccctcctcctccccaagcccgagcgggaaggtttcctcagggcgctcctggacgccacccggggacaggtggccctggagtagcatggaggcgatgcttccgctctttgaacccaaaggccgggtcctcctggtggacggccaccacctggcctaccgcaccttcttcgccctgaagggcctcaccacgagccggggcgaaccggtgcaggcggtctacggcttcgccaagagcctcctcaaggccctgaaggaggacgggtacaaggccgtcttcgtggtctttgacgccaaggccccctccttccgccacgaggcctacgaggcctacaaggcggggagggccccgacccccgaggacttcccccggcagctcgccctcatcaaggagctggtggacctcctggggtttacccgcctcgaggtccccggctacgaggcggacgacgttctcgccaccctggccaagaaggcggaaaaggaggggtacgaggtgcgcatcctcaccgccgaccgcgacctctaccaactcgtctccgaccgcgtcgccgtcctccaccccgagggccacctcatcaccccggagtggctttgggagaagtacggcctcaggccggagcagtgggtggacttccgcgccctcgtgggggacccctccgacaacctccccggggtcaagggcatcggggagaagaccgccctcaagctcctcaaggagtggggaagcctggaaaacctcctcaagaacctggaccgggtaaagccagaaaacgtccgggagaagatcaaggcccacctggaagacctcaggctctccttggagctctcccgggtgcgcaccgacctccccctggaggtggacctcgcccaggggcgggagcccgaccgggaggggcttagggccttcctggagaggctggagttcggcagcctcctccacgagttcggcctcctggaggcccccgcccccctggaggaggccccctggcccccgccggaaggggccttcgtgggcttcgtcctctcccgccccgagcccatgtgggcggagcttaaagccctggccgcctgcagggacggccgggtgcaccgggcagcagaccccttggcggggctaaaggacctcaaggaggtccggggcctcctcgccaaggacctcgccgtcttggcctcgagggaggggctagacctcgtgcccggggacgaccccatgctcctcgcctacctcctggacccctccaacaccacccccgagggggtggcgcggcgctacgggggggagtggacggaggacgccgcccaccgggccctcctctcggagaggctccatcggaacctccttaagcgcctcgagggggaggagaagctcctttggctctaccacgaggtggaaaagcccctctcccgggtcctggcccacatggaggccaccggggtacggcgggacgtggcctaccttcaggccctttccctggagcttgcggaggagatccgccgcctcgaggaggaggtcttccgcttggcgggccaccccttcaacctcaactcccgggaccagctggaaagggtgctctttgacgagcttaggcttcccgccttggggaagacgcaaaagacaggcaagcgctccaccagcgccgcggtgctggaggccctacgggaggcccaccccatcgtggagaagatcctccagcaccggtggctcaccaagctcaagaacacctacgtggaccccctcccaagcctcgtccacccgaggacgggccgcctccacacccgcttcaaccagacggccacggccacggggaggcttagtagctccgaccccaacctgcagaacatccccgtccgcacccccttgggccagaggatccgccgggccttcgtggccgaggcgggttgggcgttggtggccctggactatagccagatagagctccgcgtcctcgcccacctctccggggacgaaaacctgatcagggtcttccaggaggggaaggacatccacacccagaccgcaagctggatgttcggcgtccccccggaggccgtggaccccctgatgcgccgggcggccaagacggtgaacttcggcgtcctctacggcatgtccgcccataggctctcccaggagcttgccatcccctacgaggaggcggtggcctttatagagcgctacttccaaagcttccccaaggtgcgggcctggatagaaaagaccctggaggaggggaggaagcggggctacgtggaaaccctcttcggaagaaggcgctacgtgcccgacctcaacgcccgggtgaagagcgtcagggaggccgcggagcgcatggccttcaacatgcccgtccagggcaccgccgccgacctcatgaagctcgccatggtgaagctcttcccccgcctccgggagatgggggcccgcatgctcctccaggtccacgacgagctcctcctggaggccccccaagcgcgggccgaggaggtggcggctttggccaaggaggccatggagaaggcctatcccctcgccgtgcccctggaggtggaggtggggatgggggaggactggctttccgccaagggttaggggggccctgccgtttagaggaagttcaaggggttgtccctcagaaacgcctccaggggaacgccctctgggcctaccaggaggcctttagccccaaaggtgcgggtgaaggcttccaggccctggg

SEQ ID NO: 3505 - DNA, 3221 bp, Artificial Sequence
  Description of Artificial Sequence: Synthetic DNA sequence of Thermus thermophilus DNA Polymerase E539Y
tctagaggaagcatgagcctcaccctggcagacaaggtggtctacgaggaggagatccagaaaagccgcttcatcgccaaggcggcccccgtggcctcggaggaggaggccttggcgtttttggccgagaaccgggagcctgaggccacccacaacggccacgcctacaagatcggcctcctctaccgcttctctgacgacggggagccctcgggcaccgcaggcaggcccatcctccacgccatagaggcccagggcctggaccgggtggcggtcctggtggtgcgctacttcggcggggtgaagctcggggccggggggcttgtgcgggcctacgggggggtggcggcggaggccttaaggcgggcgcccaaggtccccttggtggagcgggtggggctcgccttcctcgtgcccttcgccgaggtgggccgggtctacgccctcctggaggcccgcgcccctgaaggccgaggagacctacaccccggaggcgtgcgcttcgccctcctcctccccaagcccgagcgggaaggtttcctcagggcgctcctggacgccacccggggacaggtggccctggagtagcatggaggcgatgcttccgctctttgaacccaaaggccgggtcctcctggtggacggccaccacctggcctaccgcaccttcttcgccctgaagggcctcaccacgagccggggcgaaccggtgcaggcggtctacggcttcgccaagagcctcctcaaggccctgaaggaggacgggtacaaggccgtcttcgtggtctttgacgccaaggccccctccttccgccacgaggcctacgaggcctacaaggcggggagggccccgacccccgaggacttcccccggcagctcgccctcatcaaggagctggtggacctcctggggtttacccgcctcgaggtccccggctacgaggcggacgacgttctcgccaccctggccaagaaggcggaaaaggaggggtacgaggtgcgcatcctcaccgccgaccgcgacctctaccaactcgtctccgaccgcgtcgccgtcctccaccccgagggccacctcatcaccccggagtggctttgggagaagtacggcctcaggccggagcagtgggtggacttccgcgccctcgtgggggacccctccgacaacctccccggggtcaagggcatcggggagaagaccgccctcaagctcctcaaggagtggggaagcctggaaaacctcctcaagaacctggaccgggtaaagccagaaaacgtccgggagaagatcaaggcccacctggaagacctcaggctctccttggagctctcccgggtgcgcaccgacctccccctggaggtggacctcgcccaggggcgggagcccgaccgggaggggcttagggccttcctggagaggctggagttcggcagcctcctccacgagttcggcctcctggaggcccccgcccccctggaggaggccccctggcccccgccggaaggggccttcgtgggcttcgtcctctcccgccccgagcccatgtgggcggagcttaaagccctggccgcctgcagggacggccgggtgcaccgggcagcagaccccttggcggggctaaaggacctcaaggaggtccggggcctcctcgccaaggacctcgccgtcttggcctcgagggaggggctagacctcgtgcccggggacgaccccatgctcctcgcctacctcctggacccctccaacaccacccccgagggggtggcgcggcgctacgggggggagtggacggaggacgccgcccaccgggccctcctctcggagaggctccatcggaacctccttaagcgcctcgagggggaggagaagctcctttggctctaccacgaggtggaaaagcccctctcccgggtcctggcccacatggaggccaccggggtacggcgggacgtggcctaccttcaggccctttccctggagcttgcggaggagatccgccgcctcgaggaggaggtcttccgcttggcgggccaccccttcaacctcaactcccgggaccagctggaaagggtgctctttgacgagcttaggcttcccgccttggggaagacgcaaaagacaggcaagcgctccaccagcgccgcggtgctggaggccctacgggaggcccaccccatcgtggagaagatcctccagcaccggtatctcaccaagctcaagaacacctacgtggaccccctcccaagcctcgtccacccgaggacgggccgcctccacacccgcttcaaccagacggccacggccacggggaggcttagtagctccgaccccaacctgcagaacatccccgtccgcacccccttgggccagaggatccgccgggccttcgtggccgaggcgggttgggcgttggtggccctggactatagccagatagagctccgcgtcctcgcccacctctccggggacgaaaacctgatcagggtcttccaggaggggaaggacatccacacccagaccgcaagctggatgttcggcgtccccccggaggccgtggaccccctgatgcgccgggcggccaagacggtgaacttcggcgtcctctacggcatgtccgcccataggctctcccaggagcttgccatcccctacgaggaggcggtggcctttatagagcgctacttccaaagcttccccaaggtgcgggcctggatagaaaagaccctggaggaggggaggaagcggggctacgtggaaaccctcttcggaagaaggcgctacgtgcccgacctcaacgcccgggtgaagagcgtcagggaggccgcggagcgcatggccttcaacatgcccgtccagggcaccgccgccgacctcatgaagctcgccatggtgaagctcttcccccgcctccgggagatgggggcccgcatgctcctccaggtccacgacgagctcctcctggaggccccccaagcgcgggccgaggaggtggcggctttggccaaggaggccatggagaaggcctatcccctcgccgtgcccctggaggtggaggtggggatgggggaggactggctttccgccaagggttaggggggccctgccgtttagaggaagttcaaggggttgtccctcagaaacgcctccaggggaacgccctctgggcctaccaggaggcctttagccccaaaggtgcgggtgaaggcttccaggccctggg

SEQ ID NO: 3506 - DNA, 3221 bp, Artificial Sequence
  Description of Artificial Sequence: Synthetic DNA sequence of Thermus thermophilus DNA Polymerase E539V
tctagaggaagcatgagcctcaccctggcagacaaggtggtctacgaggaggagatccagaaaagccgcttcatcgccaaggcggcccccgtggcctcggaggaggaggccttggcgtttttggccgagaaccgggagcctgaggccacccacaacggccacgcctacaagatcggcctcctctaccgcttctctgacgacggggagccctcgggcaccgcaggcaggcccatcctccacgccatagaggcccagggcctggaccgggtggcggtcctggtggtgcgctacttcggcggggtgaagctcggggccggggggcttgtgcgggcctacgggggggtggcggcggaggccttaaggcgggcgcccaaggtccccttggtggagcgggtggggctcgccttcctcgtgcccttcgccgaggtgggccgggtctacgccctcctggaggcccgcgcccctgaaggccgaggagacctacaccccggaggcgtgcgcttcgccctcctcctccccaagcccgagcgggaaggtttcctcagggcgctcctggacgccacccggggacaggtggccctggagtagcatggaggcgatgcttccgctctttgaacccaaaggccgggtcctcctggtggacggccaccacctggcctaccgcaccttcttcgccctgaagggcctcaccacgagccggggcgaaccggtgcaggcggtctacggcttcgccaagagcctcctcaaggccctgaaggaggacgggtacaaggccgtcttcgtggtctttgacgccaaggccccctccttccgccacgaggcctacgaggcctacaaggcggggagggccccgacccccgaggacttcccccggcagctcgccctcatcaaggagctggtggacctcctggggtttacccgcctcgaggtccccggctacgaggcggacgacgttctcgccaccctggccaagaaggcggaaaaggaggggtacgaggtgcgcatcctcaccgccgaccgcgacctctaccaactcgtctccgaccgcgtcgccgtcctccaccccgagggccacctcatcaccccggagtggctttgggagaagtacggcctcaggccggagcagtgggtggacttccgcgccctcgtgggggacccctccgacaacctccccggggtcaagggcatcggggagaagaccgccctcaagctcctcaaggagtggggaagcctggaaaacctcctcaagaacctggaccgggtaaagccagaaaacgtccgggagaagatcaaggcccacctggaagacctcaggctctccttggagctctcccgggtgcgcaccgacctccccctggaggtggacctcgcccaggggcgggagcccgaccgggaggggcttagggccttcctggagaggctggagttcggcagcctcctccacgagttcggcctcctggaggcccccgcccccctggaggaggccccctggcccccgccggaaggggccttcgtgggcttcgtcctctcccgccccgagcccatgtgggcggagcttaaagccctggccgcctgcagggacggccgggtgcaccgggcagcagaccccttggcggggctaaaggacctcaaggaggtccggggcctcctcgccaaggacctcgccgtcttggcctcgagggaggggctagacctcgtgcccggggacgaccccatgctcctcgcctacctcctggacccctccaacaccacccccgagggggtggcgcggcgctacgggggggagtggacggaggacgccgcccaccgggccctcctctcggagaggctccatcggaacctccttaagcgcctcgagggggaggagaagctcctttggctctaccacgaggtggaaaagcccctctcccgggtcctggcccacatggaggccaccggggtacggcgggacgtggcctaccttcaggccctttccctggagcttgcggaggagatccgccgcctcgaggaggaggtcttccgcttggcgggccaccccttcaacctcaactcccgggaccagctggaaagggtgctctttgacgagcttaggcttcccgccttggggaagacgcaaaagacaggcaagcgctccaccagcgccgcggtgctggaggccctacgggaggcccaccccatcgtggagaagatcctccagcaccgggttctcaccaagctcaagaacacctacgtggaccccctcccaagcctcgtccacccgaggacgggccgcctccacacccgcttcaaccagacggccacggccacggggaggcttagtagctccgaccccaacctgcagaacatccccgtccgcacccccttgggccagaggatccgccgggccttcgtggccgaggcgggttgggcgttggtggccctggactatagccagatagagctccgcgtcctcgcccacctctccggggacgaaaacctgatcagggtcttccaggaggggaaggacatccacacccagaccgcaagctggatgttcggcgtccccccggaggccgtggaccccctgatgcgccgggcggccaagacggtgaacttcggcgtcctctacggcatgtccgcccataggctctcccaggagcttgccatcccctacgaggaggcggtggcctttatagagcgctacttccaaagcttccccaaggtgcgggcctggatagaaaagaccctggaggaggggaggaagcggggctacgtggaaaccctcttcggaagaaggcgctacgtgcccgacctcaacgcccgggtgaagagcgtcagggaggccgcggagcgcatggccttcaacatgcccgtccagggcaccgccgccgacctcatgaagctcgccatggtgaagctcttcccccgcctccgggagatgggggcccgcatgctcctccaggtccacgacgagctcctcctggaggccccccaagcgcgggccgaggaggtggcggctttggccaaggaggccatggagaaggcctatcccctcgccgtgcccctggaggtggaggtggggatgggggaggactggctttccgccaagggttaggggggccctgccgtttagaggaagttcaaggggttgtccctcagaaacgcctccaggggaacgccctctgggcctaccaggaggcctttagccccaaaggtgcgggtgaaggcttccaggccctggg

SEQ ID NO: 3507 - DNA, 3221 bp, Artificial Sequence
  Description of Artificial Sequence: Synthetic DNA sequence of Thermus thermophilus DNA Polymerase A570R
tctagaggaagcatgagcctcaccctggcagacaaggtggtctacgaggaggagatccagaaaagccgcttcatcgccaaggcggcccccgtggcctcggaggaggaggccttggcgtttttggccgagaaccgggagcctgaggccacccacaacggccacgcctacaagatcggcctcctctaccgcttctctgacgacggggagccctcgggcaccgcaggcaggcccatcctccacgccatagaggcccagggcctggaccgggtggcggtcctggtggtgcgctacttcggcggggtgaagctcggggccggggggcttgtgcgggcctacgggggggtggcggcggaggccttaaggcgggcgcccaaggtccccttggtggagcgggtggggctcgccttcctcgtgcccttcgccgaggtgggccgggtctacgccctcctggaggcccgcgcccctgaaggccgaggagacctacaccccggaggcgtgcgcttcgccctcctcctccccaagcccgagcgggaaggtttcctcagggcgctcctggacgccacccggggacaggtggccctggagtagcatggaggcgatgcttccgctctttgaacccaaaggccgggtcctcctggtggacggccaccacctggcctaccgcaccttcttcgccctgaagggcctcaccacgagccggggcgaaccggtgcaggcggtctacggcttcgccaagagcctcctcaaggccctgaaggaggacgggtacaaggccgtcttcgtggtctttgacgccaaggccccctccttccgccacgaggcctacgaggcctacaaggcggggagggccccgacccccgaggacttcccccggcagctcgccctcatcaaggagctggtggacctcctggggtttacccgcctcgaggtccccggctacgaggcggacgacgttctcgccaccctggccaagaaggcggaaaaggaggggtacgaggtgcgcatcctcaccgccgaccgcgacctctaccaactcgtctccgaccgcgtcgccgtcctccaccccgagggccacctcatcaccccggagtggctttgggagaagtacggcctcaggccggagcagtgggtggacttccgcgccctcgtgggggacccctccgacaacctccccggggtcaagggcatcggggagaagaccgccctcaagctcctcaaggagtggggaagcctggaaaacctcctcaagaacctggaccgggtaaagccagaaaacgtccgggagaagatcaaggcccacctggaagacctcaggctctccttggagctctcccgggtgcgcaccgacctccccctggaggtggacctcgcccaggggcgggagcccgaccgggaggggcttagggccttcctggagaggctggagttcggcagcctcctccacgagttcggcctcctggaggcccccgcccccctggaggaggccccctggcccccgccggaaggggccttcgtgggcttcgtcctctcccgccccgagcccatgtgggcggagcttaaagccctggccgcctgcagggacggccgggtgcaccgggcagcagaccccttggcggggctaaaggacctcaaggaggtccggggcctcctcgccaaggacctcgccgtcttggcctcgagggaggggctagacctcgtgcccggggacgaccccatgctcctcgcctacctcctggacccctccaacaccacccccgagggggtggcgcggcgctacgggggggagtggacggaggacgccgcccaccgggccctcctctcggagaggctccatcggaacctccttaagcgcctcgagggggaggagaagctcctttggctctaccacgaggtggaaaagcccctctcccgggtcctggcccacatggaggccaccggggtacggcgggacgtggcctaccttcaggccctttccctggagcttgcggaggagatccgccgcctcgaggaggaggtcttccgcttggcgggccaccccttcaacctcaactcccgggaccagctggaaagggtgctctttgacgagcttaggcttcccgccttggggaagacgcaaaagacaggcaagcgctccaccagcgccgcggtgctggaggccctacgggaggcccaccccatcgtggagaagatcctccagcaccgggagctcaccaagctcaagaacacctacgtggaccccctcccaagcctcgtccacccgaggacgggccgcctccacacccgcttcaaccagacgcgtacggccacggggaggcttagtagctccgaccccaacctgcagaacatccccgtccgcacccccttgggccagaggatccgccgggccttcgtggccgaggcgggttgggcgttggtggccctggactatagccagatagagctccgcgtcctcgcccacctctccggggacgaaaacctgatcagggtcttccaggaggggaaggacatccacacccagaccgcaagctggatgttcggcgtccccccggaggccgtggaccccctgatgcgccgggcggccaagacggtgaacttcggcgtcctctacggcatgtccgcccataggctctcccaggagcttgccatcccctacgaggaggcggtggcctttatagagcgctacttccaaagcttccccaaggtgcgggcctggatagaaaagaccctggaggaggggaggaagcggggctacgtggaaaccctcttcggaagaaggcgctacgtgcccgacctcaacgcccgggtgaagagcgtcagggaggccgcggagcgcatggccttcaacatgcccgtccagggcaccgccgccgacctcatgaagctcgccatggtgaagctcttcccccgcctccgggagatgggggcccgcatgctcctccaggtccacgacgagctcctcctggaggccccccaagcgcgggccgaggaggtggcggctttggccaaggaggccatggagaaggcctatcccctcgccgtgcccctggaggtggaggtggggatgggggaggactggctttccgccaagggttaggggggccctgccgtttagaggaagttcaaggggttgtccctcagaaacgcctccaggggaacgccctctgggcctaccaggaggcctttagccccaaaggtgcgggtgaaggcttccaggccctggg

SEQ ID NO: 3508 - DNA, 3221 bp, Artificial Sequence
  Description of Artificial Sequence: Synthetic DNA sequence of Thermus thermophilus DNA Polymerase A570N
tctagaggaagcatgagcctcaccctggcagacaaggtggtctacgaggaggagatccagaaaagccgcttcatcgccaaggcggcccccgtggcctcggaggaggaggccttggcgtttttggccgagaaccgggagcctgaggccacccacaacggccacgcctacaagatcggcctcctctaccgcttctctgacgacggggagccctcgggcaccgcaggcaggcccatcctccacgccatagaggcccagggcctggaccgggtggcggtcctggtggtgcgctacttcggcggggtgaagctcggggccggggggcttgtgcgggcctacgggggggtggcggcggaggccttaaggcgggcgcccaaggtccccttggtggagcgggtggggctcgccttcctcgtgcccttcgccgaggtgggccgggtctacgccctcctggaggcccgcgcccctgaaggccgaggagacctacaccccggaggcgtgcgcttcgccctcctcctccccaagcccgagcgggaaggtttcctcagggcgctcctggacgccacccggggacaggtggccctggagtagcatggaggcgatgcttccgctctttgaacccaaaggccgggtcctcctggtggacggccaccacctggcctaccgcaccttcttcgccctgaagggcctcaccacgagccggggcgaaccggtgcaggcggtctacggcttcgccaagagcctcctcaaggccctgaaggaggacgggtacaaggccgtcttcgtggtctttgacgccaaggccccctccttccgccacgaggcctacgaggcctacaaggcggggagggccccgacccccgaggacttcccccggcagctcgccctcatcaaggagctggtggacctcctggggtttacccgcctcgaggtccccggctacgaggcggacgacgttctcgccaccctggccaagaaggcggaaaaggaggggtacgaggtgcgcatcctcaccgccgaccgcgacctctaccaactcgtctccgaccgcgtcgccgtcctccaccccgagggccacctcatcaccccggagtggctttgggagaagtacggcctcaggccggagcagtgggtggacttccgcgccctcgtgggggacccctccgacaacctccccggggtcaagggcatcggggagaagaccgccctcaagctcctcaaggagtggggaagcctggaaaacctcctcaagaacctggaccgggtaaagccagaaaacgtccgggagaagatcaaggcccacctggaagacctcaggctctccttggagctctcccgggtgcgcaccgacctccccctggaggtggacctcgcccaggggcgggagcccgaccgggaggggcttagggccttcctggagaggctggagttcggcagcctcctccacgagttcggcctcctggaggcccccgcccccctggaggaggccccctggcccccgccggaaggggccttcgtgggcttcgtcctctcccgccccgagcccatgtgggcggagcttaaagccctggccgcctgcagggacggccgggtgcaccgggcagcagaccccttggcggggctaaaggacctcaaggaggtccggggcctcctcgccaaggacctcgccgtcttggcctcgagggaggggctagacctcgtgcccggggacgaccccatgctcctcgcctacctcctggacccctccaacaccacccccgagggggtggcgcggcgctacgggggggagtggacggaggacgccgcccaccgggccctcctctcggagaggctccatcggaacctccttaagcgcctcgagggggaggagaagctcctttggctctaccacgaggtggaaaagcccctctcccgggtcctggcccacatggaggccaccggggtacggcgggacgtggcctaccttcaggccctttccctggagcttgcggaggagatccgccgcctcgaggaggaggtcttccgcttggcgggccaccccttcaacctcaactcccgggaccagctggaaagggtgctctttgacgagcttaggcttcccgccttggggaagacgcaaaagacaggcaagcgctccaccagcgccgcggtgctggaggccctacgggaggcccaccccatcgtggagaagatcctccagcaccgggagctcaccaagctcaagaacacctacgtggaccccctcccaagcctcgtccacccgaggacgggccgcctccacacccgcttcaaccagacgaatacggccacggggaggcttagtagctccgaccccaacctgcagaacatccccgtccgcacccccttgggccagaggatccgccgggccttcgtggccgaggcgggttgggcgttggtggccctggactatagccagatagagctccgcgtcctcgcccacctctccggggacgaaaacctgatcagggtcttccaggaggggaaggacatccacacccagaccgcaagctggatgttcggcgtccccccggaggccgtggaccccctgatgcgccgggcggccaagacggtgaacttcggcgtcctctacggcatgtccgcccataggctctcccaggagcttgccatcccctacgaggaggcggtggcctttatagagcgctacttccaaagcttccccaaggtgcgggcctggatagaaaagaccctggaggaggggaggaagcggggctacgtggaaaccctcttcggaagaaggcgctacgtgcccgacctcaacgcccgggtgaagagcgtcagggaggccgcggagcgcatggccttcaacatgcccgtccagggcaccgccgccgacctcatgaagctcgccatggtgaagctcttcccccgcctccgggagatgggggcccgcatgctcctccaggtccacgacgagctcctcctggaggccccccaagcgcgggccgaggaggtggcggctttggccaaggaggccatggagaaggcctatcccctcgccgtgcccctggaggtggaggtggggatgggggaggactggctttccgccaagggttaggggggccctgccgtttagaggaagttcaaggggttgtccctcagaaacgcctccaggggaacgccctctgggcctaccaggaggcctttagccccaaaggtgcgggtgaaggcttccaggccctggg

SEQ ID NO: 3509 - DNA, 3221 bp, Artificial Sequence
  Description of Artificial Sequence: Synthetic DNA sequence of Thermus thermophilus DNA Polymerase A570D
tctagaggaagcatgagcctcaccctggcagacaaggtggtctacgaggaggagatccagaaaagccgcttcatcgccaaggcggcccccgtggcctcggaggaggaggccttggcgtttttggccgagaaccgggagcctgaggccacccacaacggccacgcctacaagatcggcctcctctaccgcttctctgacgacggggagccctcgggcaccgcaggcaggcccatcctccacgccatagaggcccagggcctggaccgggtggcggtcctggtggtgcgctacttcggcggggtgaagctcggggccggggggcttgtgcgggcctacgggggggtggcggcggaggccttaaggcgggcgcccaaggtccccttggtggagcgggtggggctcgccttcctcgtgcccttcgccgaggtgggccgggtctacgccctcctggaggcccgcgcccctgaaggccgaggagacctacaccccggaggcgtgcgcttcgccctcctcctccccaagcccgagcgggaaggtttcctcagggcgctcctggacgccacccggggacaggtggccctggagtagcatggaggcgatgcttccgctctttgaacccaaaggccgggtcctcctggtggacggccaccacctggcctaccgcaccttcttcgccctgaagggcctcaccacgagccggggcgaaccggtgcaggcggtctacggcttcgccaagagcctcctcaaggccctgaaggaggacgggtacaaggccgtcttcgtggtctttgacgccaaggccccctccttccgccacgaggcctacgaggcctacaaggcggggagggccccgacccccgaggacttcccccggcagctcgccctcatcaaggagctggtggacctcctggggtttacccgcctcgaggtccccggctacgaggcggacgacgttctcgccaccctggccaagaaggcggaaaaggaggggtacgaggtgcgcatcctcaccgccgaccgcgacctctaccaactcgtctccgaccgcgtcgccgtcctccaccccgagggccacctcatcaccccggagtggctttgggagaagtacggcctcaggccggagcagtgggtggacttccgcgccctcgtgggggacccctccgacaacctccccggggtcaagggcatcggggagaagaccgccctcaagctcctcaaggagtggggaagcctggaaaacctcctcaagaacctggaccgggtaaagccagaaaacgtccgggagaagatcaaggcccacctggaagacctcaggctctccttggagctctcccgggtgcgcaccgacctccccctggaggtggacctcgcccaggggcgggagcccgaccgggaggggcttagggccttcctggagaggctggagttcggcagcctcctccacgagttcggcctcctggaggcccccgcccccctggaggaggccccctggcccccgccggaaggggccttcgtgggcttcgtcctctcccgccccgagcccatgtgggcggagcttaaagccctggccgcctgcagggacggccgggtgcaccgggcagcagaccccttggcggggctaaaggacctcaaggaggtccggggcctcctcgccaaggacctcgccgtcttggcctcgagggaggggctagacctcgtgcccggggacgaccccatgctcctcgcctacctcctggacccctccaacaccacccccgagggggtggcgcggcgctacgggggggagtggacggaggacgccgcccaccgggccctcctctcggagaggctccatcggaacctccttaagcgcctcgagggggaggagaagctcctttggctctaccacgaggtggaaaagcccctctcccgggtcctggcccacatggaggccaccggggtacggcgggacgtggcctaccttcaggccctttccctggagcttgcggaggagatccgccgcctcgaggaggaggtcttccgcttggcgggccaccccttcaacctcaactcccgggaccagctggaaagggtgctctttgacgagcttaggcttcccgccttggggaagacgcaaaagacaggcaagcgctccaccagcgccgcggtgctggaggccctacgggaggcccaccccatcgtggagaagatcctccagcaccgggagctcaccaagctcaagaacacctacgtggaccccctcccaagcctcgtccacccgaggacgggccgcctccacacccgcttcaaccagacggatacggccacggggaggcttagtagctccgaccccaacctgcagaacatccccgtccgcacccccttgggccagaggatccgccgggccttcgtggccgaggcgggttgggcgttggtggccctggactatagccagatagagctccgcgtcctcgcccacctctccggggacgaaaacctgatcagggtcttccaggaggggaaggacatccacacccagaccgcaagctggatgttcggcgtccccccggaggccgtggaccccctgatgcgccgggcggccaagacggtgaacttcggcgtcctctacggcatgtccgcccataggctctcccaggagcttgccatcccctacgaggaggcggtggcctttatagagcgctacttccaaagcttccccaaggtgcgggcctggatagaaaagaccctggaggaggggaggaagcggggctacgtggaaaccctcttcggaagaaggcgctacgtgcccgacctcaacgcccgggtgaagagcgtcagggaggccgcggagcgcatggccttcaacatgcccgtccagggcaccgccgccgacctcatgaagctcgccatggtgaagctcttcccccgcctccgggagatgggggcccgcatgctcctccaggtccacgacgagctcctcctggaggccccccaagcgcgggccgaggaggtggcggctttggccaaggaggccatggagaaggcctatcccctcgccgtgcccctggaggtggaggtggggatgggggaggactggctttccgccaagggttaggggggccctgccgtttagaggaagttcaaggggttgtccctcagaaacgcctccaggggaacgccctctgggcctaccaggaggcctttagccccaaaggtgcgggtgaaggcttccaggccctggg

SEQ ID NO: 3510 - DNA, 3221 bp, Artificial Sequence
  Description of Artificial Sequence: Synthetic DNA sequence of Thermus thermophilus DNA Polymerase A570C
tctagaggaagcatgagcctcaccctggcagacaaggtggtctacgaggaggagatccagaaaagccgcttcatcgccaaggcggcccccgtggcctcggaggaggaggccttggcgtttttggccgagaaccgggagcctgaggccacccacaacggccacgcctacaagatcggcctcctctaccgcttctctgacgacggggagccctcgggcaccgcaggcaggcccatcctccacgccatagaggcccagggcctggaccgggtggcggtcctggtggtgcgctacttcggcggggtgaagctcggggccggggggcttgtgcgggcctacgggggggtggcggcggaggccttaaggcgggcgcccaaggtccccttggtggagcgggtggggctcgccttcctcgtgcccttcgccgaggtgggccgggtctacgccctcctggaggcccgcgcccctgaaggccgaggagacctacaccccggaggcgtgcgcttcgccctcctcctccccaagcccgagcgggaaggtttcctcagggcgctcctggacgccacccggggacaggtggccctggagtagcatggaggcgatgcttccgctctttgaacccaaaggccgggtcctcctggtggacggccaccacctggcctaccgcaccttcttcgccctgaagggcctcaccacgagccggggcgaaccggtgcaggcggtctacggcttcgccaagagcctcctcaaggccctgaaggaggacgggtacaaggccgtcttcgtggtctttgacgccaaggccccctccttccgccacgaggcctacgaggcctacaaggcggggagggccccgacccccgaggacttcccccggcagctcgccctcatcaaggagctggtggacctcctggggtttacccgcctcgaggtccccggctacgaggcggacgacgttctcgccaccctggccaagaaggcggaaaaggaggggtacgaggtgcgcatcctcaccgccgaccgcgacctctaccaactcgtctccgaccgcgtcgccgtcctccaccccgagggccacctcatcaccccggagtggctttgggagaagtacggcctcaggccggagcagtgggtggacttccgcgccctcgtgggggacccctccgacaacctccccggggtcaagggcatcggggagaagaccgccctcaagctcctcaaggagtggggaagcctggaaaacctcctcaagaacctggaccgggtaaagccagaaaacgtccgggagaagatcaaggcccacctggaagacctcaggctctccttggagctctcccgggtgcgcaccgacctccccctggaggtggacctcgcccaggggcgggagcccgaccgggaggggcttagggccttcctggagaggctggagttcggcagcctcctccacgagttcggcctcctggaggcccccgcccccctggaggaggccccctggcccccgccggaaggggccttcgtgggcttcgtcctctcccgccccgagcccatgtgggcggagcttaaagccctggccgcctgcagggacggccgggtgcaccgggcagcagaccccttggcggggctaaaggacctcaaggaggtccggggcctcctcgccaaggacctcgccgtcttggcctcgagggaggggctagacctcgtgcccggggacgaccccatgctcctcgcctacctcctggacccctccaacaccacccccgagggggtggcgcggcgctacgggggggagtggacggaggacgccgcccaccgggccctcctctcggagaggctccatcggaacctccttaagcgcctcgagggggaggagaagctcctttggctctaccacgaggtggaaaagcccctctcccgggtcctggcccacatggaggccaccggggtacggcgggacgtggcctaccttcaggccctttccctggagcttgcggaggagatccgccgcctcgaggaggaggtcttccgcttggcgggccaccccttcaacctcaactcccgggaccagctggaaagggtgctctttgacgagcttaggcttcccgccttggggaagacgcaaaagacaggcaagcgctccaccagcgccgcggtgctggaggccctacgggaggcccaccccatcgtggagaagatcctccagcaccgggagctcaccaagctcaagaacacctacgtggaccccctcccaagcctcgtccacccgaggacgggccgcctccacacccgcttcaaccagacgtgtacggccacggggaggcttagtagctccgaccccaacctgcagaacatccccgtccgcacccccttgggccagaggatccgccgggccttcgtggccgaggcgggttgggcgttggtggccctggactatagccagatagagctccgcgtcctcgcccacctctccggggacgaaaacctgatcagggtcttccaggaggggaaggacatccacacccagaccgcaagctggatgttcggcgtccccccggaggccgtggaccccctgatgcgccgggcggccaagacggtgaacttcggcgtcctctacggcatgtccgcccataggctctcccaggagcttgccatcccctacgaggaggcggtggcctttatagagcgctacttccaaagcttccccaaggtgcgggcctggatagaaaagaccctggaggaggggaggaagcggggctacgtggaaaccctcttcggaagaaggcgctacgtgcccgacctcaacgcccgggtgaagagcgtcagggaggccgcggagcgcatggccttcaacatgcccgtccagggcaccgccgccgacctcatgaagctcgccatggtgaagctcttcccccgcctccgggagatgggggcccgcatgctcctccaggtccacgacgagctcctcctggaggccccccaagcgcgggccgaggaggtggcggctttggccaaggaggccatggagaaggcctatcccctcgccgtgcccctggaggtggaggtggggatgggggaggactggctttccgccaagggttaggggggccctgccgtttagaggaagttcaaggggttgtccctcagaaacgcctccaggggaacgccctctgggcctaccaggaggcctttagccccaaaggtgcgggtgaaggcttccaggccctggg

SEQ ID NO: 3511 - DNA, 3221 bp, Artificial Sequence
  Description of Artificial Sequence: Synthetic DNA sequence of Thermus thermophilus DNA Polymerase A570E
tctagaggaagcatgagcctcaccctggcagacaaggtggtctacgaggaggagatccagaaaagccgcttcatcgccaaggcggcccccgtggcctcggaggaggaggccttggcgtttttggccgagaaccgggagcctgaggccacccacaacggccacgcctacaagatcggcctcctctaccgcttctctgacgacggggagccctcgggcaccgcaggcaggcccatcctccacgccatagaggcccagggcctggaccgggtggcggtcctggtggtgcgctacttcggcggggtgaagctcggggccggggggcttgtgcgggcctacgggggggtggcggcggaggccttaaggcgggcgcccaaggtccccttggtggagcgggtggggctcgccttcctcgtgcccttcgccgaggtgggccgggtctacgccctcctggaggcccgcgcccctgaaggccgaggagacctacaccccggaggcgtgcgcttcgccctcctcctccccaagcccgagcgggaaggtttcctcagggcgctcctggacgccacccggggacaggtggccctggagtagcatggaggcgatgcttccgctctttgaacccaaaggccgggtcctcctggtggacggccaccacctggcctaccgcaccttcttcgccctgaagggcctcaccacgagccggggcgaaccggtgcaggcggtctacggcttcgccaagagcctcctcaaggccctgaaggaggacgggtacaaggccgtcttcgtggtctttgacgccaaggccccctccttccgccacgaggcctacgaggcctacaaggcggggagggccccgacccccgaggacttcccccggcagctcgccctcatcaaggagctggtggacctcctggggtttacccgcctcgaggtccccggctacgaggcggacgacgttctcgccaccctggccaagaaggcggaaaaggaggggtacgaggtgcgcatcctcaccgccgaccgcgacctctaccaactcgtctccgaccgcgtcgccgtcctccaccccgagggccacctcatcaccccggagtggctttgggagaagtacggcctcaggccggagcagtgggtggacttccgcgccctcgtgggggacccctccgacaacctccccggggtcaagggcatcggggagaagaccgccctcaagctcctcaaggagtggggaagcctggaaaacctcctcaagaacctggaccgggtaaagccagaaaacgtccgggagaagatcaaggcccacctggaagacctcaggctctccttggagctctcccgggtgcgcaccgacctccccctggaggtggacctcgcccaggggcgggagcccgaccgggaggggcttagggccttcctggagaggctggagttcggcagcctcctccacgagttcggcctcctggaggcccccgcccccctggaggaggccccctggcccccgccggaaggggccttcgtgggcttcgtcctctcccgccccgagcccatgtgggcggagcttaaagccctggccgcctgcagggacggccgggtgcaccgggcagcagaccccttggcggggctaaaggacctcaaggaggtccggggcctcctcgccaaggacctcgccgtcttggcctcgagggaggggctagacctcgtgcccggggacgaccccatgctcctcgcctacctcctggacccctccaacaccacccccgagggggtggcgcggcgctacgggggggagtggacggaggacgccgcccaccgggccctcctctcggagaggctccatcggaacctccttaagcgcctcgagggggaggagaagctcctttggctctaccacgaggtggaaaagcccctctcccgggtcctggcccacatggaggccaccggggtacggcgggacgtggcctaccttcaggccctttccctggagcttgcggaggagatccgccgcctcgaggaggaggtcttccgcttggcgggccaccccttcaacctcaactcccgggaccagctggaaagggtgctctttgacgagcttaggcttcccgccttggggaagacgcaaaagacaggcaagcgctccaccagcgccgcggtgctggaggccctacgggaggcccaccccatcgtggagaagatcctccagcaccgggagctcaccaagctcaagaacacctacgtggaccccctcccaagcctcgtccacccgaggacgggccgcctccacacccgcttcaaccagacggaaacggccacggggaggcttagtagctccgaccccaacctgcagaacatccccgtccgcacccccttgggccagaggatccgccgggccttcgtggccgaggcgggttgggcgttggtggccctggactatagccagatagagctccgcgtcctcgcccacctctccggggacgaaaacctgatcagggtcttccaggaggggaaggacatccacacccagaccgcaagctggatgttcggcgtccccccggaggccgtggaccccctgatgcgccgggcggccaagacggtgaacttcggcgtcctctacggcatgtccgcccataggctctcccaggagcttgccatcccctacgaggaggcggtggcctttatagagcgctacttccaaagcttccccaaggtgcgggcctggatagaaaagaccctggaggaggggaggaagcggggctacgtggaaaccctcttcggaagaaggcgctacgtgcccgacctcaacgcccgggtgaagagcgtcagggaggccgcggagcgcatggccttcaacatgcccgtccagggcaccgccgccgacctcatgaagctcgccatggtgaagctcttcccccgcctccgggagatgggggcccgcatgctcctccaggtccacgacgagctcctcctggaggccccccaagcgcgggccgaggaggtggcggctttggccaaggaggccatggagaaggcctatcccctcgccgtgcccctggaggtggaggtggggatgggggaggactggctttccgccaagggttaggggggccctgccgtttagaggaagttcaaggggttgtccctcagaaacgcctccaggggaacgccctctgggcctaccaggaggcctttagccccaaaggtgcgggtgaaggcttccaggccctggg

SEQ ID NO: 3512 - DNA, 3221 bp, Artificial Sequence
  Description of Artificial Sequence: Synthetic DNA sequence of Thermus thermophilus DNA Polymerase A570Q
tctagaggaagcatgagcctcaccctggcagacaaggtggtctacgaggaggagatccagaaaagccgcttcatcgccaaggcggcccccgtggcctcggaggaggaggccttggcgtttttggccgagaaccgggagcctgaggccacccacaacggccacgcctacaagatcggcctcctctaccgcttctctgacgacggggagccctcgggcaccgcaggcaggcccatcctccacgccatagaggcccagggcctggaccgggtggcggtcctggtggtgcgctacttcggcggggtgaagctcggggccggggggcttgtgcgggcctacgggggggtggcggcggaggccttaaggcgggcgcccaaggtccccttggtggagcgggtggggctcgccttcctcgtgcccttcgccgaggtgggccgggtctacgccctcctggaggcccgcgcccctgaaggccgaggagacctacaccccggaggcgtgcgcttcgccctcctcctccccaagcccgagcgggaaggtttcctcagggcgctcctggacgccacccggggacaggtggccctggagtagcatggaggcgatgcttccgctctttgaacccaaaggccgggtcctcctggtggacggccaccacctggcctaccgcaccttcttcgccctgaagggcctcaccacgagccggggcgaaccggtgcaggcggtctacggcttcgccaagagcctcctcaaggccctgaaggaggacgggtacaaggccgtcttcgtggtctttgacgccaaggccccctccttccgccacgaggcctacgaggcctacaaggcggggagggccccgacccccgaggacttcccccggcagctcgccctcatcaaggagctggtggacctcctggggtttacccgcctcgaggtccccggctacgaggcggacgacgttctcgccaccctggccaagaaggcggaaaaggaggggtacgaggtgcgcatcctcaccgccgaccgcgacctctaccaactcgtctccgaccgcgtcgccgtcctccaccccgagggccacctcatcaccccggagtggctttgggagaagtacggcctcaggccggagcagtgggtggacttccgcgccctcgtgggggacccctccgacaacctccccggggtcaagggcatcggggagaagaccgccctcaagctcctcaaggagtggggaagcctggaaaacctcctcaagaacctggaccgggtaaagccagaaaacgtccgggagaagatcaaggcccacctggaagacctcaggctctccttggagctctcccgggtgcgcaccgacctccccctggaggtggacctcgcccaggggcgggagcccgaccgggaggggcttagggccttcctggagaggctggagttcggcagcctcctccacgagttcggcctcctggaggcccccgcccccctggaggaggccccctggcccccgccggaaggggccttcgtgggcttcgtcctctcccgccccgagcccatgtgggcggagcttaaagccctggccgcctgcagggacggccgggtgcaccgggcagcagaccccttggcggggctaaaggacctcaaggaggtccggggcctcctcgccaaggacctcgccgtcttggcctcgagggaggggctagacctcgtgcccggggacgaccccatgctcctcgcctacctcctggacccctccaacaccacccccgagggggtggcgcggcgctacgggggggagtggacggaggacgccgcccaccgggccctcctctcggagaggctccatcggaacctccttaagcgcctcgagggggaggagaagctcctttggctctaccacgaggtggaaaagcccctctcccgggtcctggcccacatggaggccaccggggtacggcgggacgtggcctaccttcaggccctttccctggagcttgcggaggagatccgccgcctcgaggaggaggtcttccgcttggcgggccaccccttcaacctcaactcccgggaccagctggaaagggtgctctttgacgagcttaggcttcccgccttggggaagacgcaaaagacaggcaagcgctccaccagcgccgcggtgctggaggccctacgggaggcccaccccatcgtggagaagatcctccagcaccgggagctcaccaagctcaagaacacctacgtggaccccctcccaagcctcgtccacccgaggacgggccgcctccacacccgcttcaaccagacgcaaacggccacggggaggcttagtagctccgaccccaacctgcagaacatccccgtccgcacccccttgggccagaggatccgccgggccttcgtggccgaggcgggttgggcgttggtggccctggactatagccagatagagctccgcgtcctcgcccacctctccggggacgaaaacctgatcagggtcttccaggaggggaaggacatccacacccagaccgcaagctggatgttcggcgtccccccggaggccgtggaccccctgatgcgccgggcggccaagacggtgaacttcggcgtcctctacggcatgtccgcccataggctctcccaggagcttgccatcccctacgaggaggcggtggcctttatagagcgctacttccaaagcttccccaaggtgcgggcctggatagaaaagaccctggaggaggggaggaagcggggctacgtggaaaccctcttcggaagaaggcgctacgtgcccgacctcaacgcccgggtgaagagcgtcagggaggccgcggagcgcatggccttcaacatgcccgtccagggcaccgccgccgacctcatgaagctcgccatggtgaagctcttcccccgcctccgggagatgggggcccgcatgctcctccaggtccacgacgagctcctcctggaggccccccaagcgcgggccgaggaggtggcggctttggccaaggaggccatggagaaggcctatcccctcgccgtgcccctggaggtggaggtggggatgggggaggactggctttccgccaagggttaggggggccctgccgtttagaggaagttcaaggggttgtccctcagaaacgcctccaggggaacgccctctgggcctaccaggaggcctttagccccaaaggtgcgggtgaaggcttccaggccctggg

SEQ ID NO: 3513 - DNA, 3221 bp, Artificial Sequence
  Description of Artificial Sequence: Synthetic DNA sequence of Thermus thermophilus DNA Polymerase A570G
tctagaggaagcatgagcctcaccctggcagacaaggtggtctacgaggaggagatccagaaaagccgcttcatcgccaaggcggcccccgtggcctcggaggaggaggccttggcgtttttggccgagaaccgggagcctgaggccacccacaacggccacgcctacaagatcggcctcctctaccgcttctctgacgacggggagccctcgggcaccgcaggcaggcccatcctccacgccatagaggcccagggcctggaccgggtggcggtcctggtggtgcgctacttcggcggggtgaagctcggggccggggggcttgtgcgggcctacgggggggtggcggcggaggccttaaggcgggcgcccaaggtccccttggtggagcgggtggggctcgccttcctcgtgcccttcgccgaggtgggccgggtctacgccctcctggaggcccgcgcccctgaaggccgaggagacctacaccccggaggcgtgcgcttcgccctcctcctccccaagcccgagcgggaaggtttcctcagggcgctcctggacgccacccggggacaggtggccctggagtagcatggaggcgatgcttccgctctttgaacccaaaggccgggtcctcctggtggacggccaccacctggcctaccgcaccttcttcgccctgaagggcctcaccacgagccggggcgaaccggtgcaggcggtctacggcttcgccaagagcctcctcaaggccctgaaggaggacgggtacaaggccgtcttcgtggtctttgacgccaaggccccctccttccgccacgaggcctacgaggcctacaaggcggggagggccccgacccccgaggacttcccccggcagctcgccctcatcaaggagctggtggacctcctggggtttacccgcctcgaggtccccggctacgaggcggacgacgttctcgccaccctggccaagaaggcggaaaaggaggggtacgaggtgcgcatcctcaccgccgaccgcgacctctaccaactcgtctccgaccgcgtcgccgtcctccaccccgagggccacctcatcaccccggagtggctttgggagaagtacggcctcaggccggagcagtgggtggacttccgcgccctcgtgggggacccctccgacaacctccccggggtcaagggcatcggggagaagaccgccctcaagctcctcaaggagtggggaagcctggaaaacctcctcaagaacctggaccgggtaaagccagaaaacgtccgggagaagatcaaggcccacctggaagacctcaggctctccttggagctctcccgggtgcgcaccgacctccccctggaggtggacctcgcccaggggcgggagcccgaccgggaggggcttagggccttcctggagaggctggagttcggcagcctcctccacgagttcggcctcctggaggcccccgcccccctggaggaggccccctggcccccgccggaaggggccttcgtgggcttcgtcctctcccgccccgagcccatgtgggcggagcttaaagccctggccgcctgcagggacggccgggtgcaccgggcagcagaccccttggcggggctaaaggacctcaaggaggtccggggcctcctcgccaaggacctcgccgtcttggcctcgagggaggggctagacctcgtgcccggggacgaccccatgctcctcgcctacctcctggacccctccaacaccacccccgagggggtggcgcggcgctacgggggggagtggacggaggacgccgcccaccgggccctcctctcggagaggctccatcggaacctccttaagcgcctcgagggggaggagaagctcctttggctctaccacgaggtggaaaagcccctctcccgggtcctggcccacatggaggccaccggggtacggcgggacgtggcctaccttcaggccctttccctggagcttgcggaggagatccgccgcctcgaggaggaggtcttccgcttggcgggccaccccttcaacctcaactcccgggaccagctggaaagggtgctctttgacgagcttaggcttcccgccttggggaagacgcaaaagacaggcaagcgctccaccagcgccgcggtgctggaggccctacgggaggcccaccccatcgtggagaagatcctccagcaccgggagctcaccaagctcaagaacacctacgtggaccccctcccaagcctcgtccacccgaggacgggccgcctccacacccgcttcaaccagacgggtacggccacggggaggcttagtagctccgaccccaacctgcagaacatccccgtccgcacccccttgggccagaggatccgccgggccttcgtggccgaggcgggttgggcgttggtggccctggactatagccagatagagctccgcgtcctcgcccacctctccggggacgaaaacctgatcagggtcttccaggaggggaaggacatccacacccagaccgcaagctggatgttcggcgtccccccggaggccgtggaccccctgatgcgccgggcggccaagacggtgaacttcggcgtcctctacggcatgtccgcccataggctctcccaggagcttgccatcccctacgaggaggcggtggcctttatagagcgctacttccaaagcttccccaaggtgcgggcctggatagaaaagaccctggaggaggggaggaagcggggctacgtggaaaccctcttcggaagaaggcgctacgtgcccgacctcaacgcccgggtgaagagcgtcagggaggccgcggagcgcatggccttcaacatgcccgtccagggcaccgccgccgacctcatgaagctcgccatggtgaagctcttcccccgcctccgggagatgggggcccgcatgctcctccaggtccacgacgagctcctcctggaggccccccaagcgcgggccgaggaggtggcggctttggccaaggaggccatggagaaggcctatcccctcgccgtgcccctggaggtggaggtggggatgggggaggactggctttccgccaagggttaggggggccctgccgtttagaggaagttcaaggggttgtccctcagaaacgcctccaggggaacgccctctgggcctaccaggaggcctttagccccaaaggtgcgggtgaaggcttccaggccctggg

SEQ ID NO: 3514 - DNA, 3221 bp, Artificial Sequence
  Description of Artificial Sequence: Synthetic DNA sequence of Thermus thermophilus DNA Polymerase A570H
tctagaggaagcatgagcctcaccctggcagacaaggtggtctacgaggaggagatccagaaaagccgcttcatcgccaaggcggcccccgtggcctcggaggaggaggccttggcgtttttggccgagaaccgggagcctgaggccacccacaacggccacgcctacaagatcggcctcctctaccgcttctctgacgacggggagccctcgggcaccgcaggcaggcccatcctccacgccatagaggcccagggcctggaccgggtggcggtcctggtggtgcgctacttcggcggggtgaagctcggggccggggggcttgtgcgggcctacgggggggtggcggcggaggccttaaggcgggcgcccaaggtccccttggtggagcgggtggggctcgccttcctcgtgcccttcgccgaggtgggccgggtctacgccctcctggaggcccgcgcccctgaaggccgaggagacctacaccccggaggcgtgcgcttcgccctcctcctccccaagcccgagcgggaaggtttcctcagggcgctcctggacgccacccggggacaggtggccctggagtagcatggaggcgatgcttccgctctttgaacccaaaggccgggtcctcctggtggacggccaccacctggcctaccgcaccttcttcgccctgaagggcctcaccacgagccggggcgaaccggtgcaggcggtctacggcttcgccaagagcctcctcaaggccctgaaggaggacgggtacaaggccgtcttcgtggtctttgacgccaaggccccctccttccgccacgaggcctacgaggcctacaaggcggggagggccccgacccccgaggacttcccccggcagctcgccctcatcaaggagctggtggacctcctggggtttacccgcctcgaggtccccggctacgaggcggacgacgttctcgccaccctggccaagaaggcggaaaaggaggggtacgaggtgcgcatcctcaccgccgaccgcgacctctaccaactcgtctccgaccgcgtcgccgtcctccaccccgagggccacctcatcaccccggagtggctttgggagaagtacggcctcaggccggagcagtgggtggacttccgcgccctcgtgggggacccctccgacaacctccccggggtcaagggcatcggggagaagaccgccctcaagctcctcaaggagtggggaagcctggaaaacctcctcaagaacctggaccgggtaaagccagaaaacgtccgggagaagatcaaggcccacctggaagacctcaggctctccttggagctctcccgggtgcgcaccgacctccccctggaggtggacctcgcccaggggcgggagcccgaccgggaggggcttagggccttcctggagaggctggagttcggcagcctcctccacgagttcggcctcctggaggcccccgcccccctggaggaggccccctggcccccgccggaaggggccttcgtgggcttcgtcctctcccgccccgagcccatgtgggcggagcttaaagccctggccgcctgcagggacggccgggtgcaccgggcagcagaccccttggcggggctaaaggacctcaaggaggtccggggcctcctcgccaaggacctcgccgtcttggcctcgagggaggggctagacctcgtgcccggggacgaccccatgctcctcgcctacctcctggacccctccaacaccacccccgagggggtggcgcggcgctacgggggggagtggacggaggacgccgcccaccgggccctcctctcggagaggctccatcggaacctccttaagcgcctcgagggggaggagaagctcctttggctctaccacgaggtggaaaagcccctctcccgggtcctggcccacatggaggccaccggggtacggcgggacgtggcctaccttcaggccctttccctggagcttgcggaggagatccgccgcctcgaggaggaggtcttccgcttggcgggccaccccttcaacctcaactcccgggaccagctggaaagggtgctctttgacgagcttaggcttcccgccttggggaagacgcaaaagacaggcaagcgctccaccagcgccgcggtgctggaggccctacgggaggcccaccccatcgtggagaagatcctccagcaccgggagctcaccaagctcaagaacacctacgtggaccccctcccaagcctcgtccacccgaggacgggccgcctccacacccgcttcaaccagacgcatacggccacggggaggcttagtagctccgaccccaacctgcagaacatccccgtccgcacccccttgggccagaggatccgccgggccttcgtggccgaggcgggttgggcgttggtggccctggactatagccagatagagctccgcgtcctcgcccacctctccggggacgaaaacctgatcagggtcttccaggaggggaaggacatccacacccagaccgcaagctggatgttcggcgtccccccggaggccgtggaccccctgatgcgccgggcggccaagacggtgaacttcggcgtcctctacggcatgtccgcccataggctctcccaggagcttgccatcccctacgaggaggcggtggcctttatagagcgctacttccaaagcttccccaaggtgcgggcctggatagaaaagaccctggaggaggggaggaagcggggctacgtggaaaccctcttcggaagaaggcgctacgtgcccgacctcaacgcccgggtgaagagcgtcagggaggccgcggagcgcatggccttcaacatgcccgtccagggcaccgccgccgacctcatgaagctcgccatggtgaagctcttcccccgcctccgggagatgggggcccgcatgctcctccaggtccacgacgagctcctcctggaggccccccaagcgcgggccgaggaggtggcggctttggccaaggaggccatggagaaggcctatcccctcgccgtgcccctggaggtggaggtggggatgggggaggactggctttccgccaagggttaggggggccctgccgtttagaggaagttcaaggggttgtccctcagaaacgcctccaggggaacgccctctgggcctaccaggaggcctttagccccaaaggtgcgggtgaaggcttccaggccctggg

SEQ ID NO: 3515 - DNA, 3221 bp, Artificial Sequence
  Description of Artificial Sequence: Synthetic DNA sequence of Thermus thermophilus DNA Polymerase A570I
tctagaggaagcatgagcctcaccctggcagacaaggtggtctacgaggaggagatccagaaaagccgcttcatcgccaaggcggcccccgtggcctcggaggaggaggccttggcgtttttggccgagaaccgggagcctgaggccacccacaacggccacgcctacaagatcggcctcctctaccgcttctctgacgacggggagccctcgggcaccgcaggcaggcccatcctccacgccatagaggcccagggcctggaccgggtggcggtcctggtggtgcgctacttcggcggggtgaagctcggggccggggggcttgtgcgggcctacgggggggtggcggcggaggccttaaggcgggcgcccaaggtccccttggtggagcgggtggggctcgccttcctcgtgcccttcgccgaggtgggccgggtctacgccctcctggaggcccgcgcccctgaaggccgaggagacctacaccccggaggcgtgcgcttcgccctcctcctccccaagcccgagcgggaaggtttcctcagggcgctcctggacgccacccggggacaggtggccctggagtagcatggaggcgatgcttccgctctttgaacccaaaggccgggtcctcctggtggacggccaccacctggcctaccgcaccttcttcgccctgaagggcctcaccacgagccggggcgaaccggtgcaggcggtctacggcttcgccaagagcctcctcaaggccctgaaggaggacgggtacaaggccgtcttcgtggtctttgacgccaaggccccctccttccgccacgaggcctacgaggcctacaaggcggggagggccccgacccccgaggacttcccccggcagctcgccctcatcaaggagctggtggacctcctggggtttacccgcctcgaggtccccggctacgaggcggacgacgttctcgccaccctggccaagaaggcggaaaaggaggggtacgaggtgcgcatcctcaccgccgaccgcgacctctaccaactcgtctccgaccgcgtcgccgtcctccaccccgagggccacctcatcaccccggagtggctttgggagaagtacggcctcaggccggagcagtgggtggacttccgcgccctcgtgggggacccctccgacaacctccccggggtcaagggcatcggggagaagaccgccctcaagctcctcaaggagtggggaagcctggaaaacctcctcaagaacctggaccgggtaaagccagaaaacgtccgggagaagatcaaggcccacctggaagacctcaggctctccttggagctctcccgggtgcgcaccgacctccccctggaggtggacctcgcccaggggcgggagcccgaccgggaggggcttagggccttcctggagaggctggagttcggcagcctcctccacgagttcggcctcctggaggcccccgcccccctggaggaggccccctggcccccgccggaaggggccttcgtgggcttcgtcctctcccgccccgagcccatgtgggcggagcttaaagccctggccgcctgcagggacggccgggtgcaccgggcagcagaccccttggcggggctaaaggacctcaaggaggtccggggcctcctcgccaaggacctcgccgtcttggcctcgagggaggggctagacctcgtgcccggggacgaccccatgctcctcgcctacctcctggacccctccaacaccacccccgagggggtggcgcggcgctacgggggggagtggacggaggacgccgcccaccgggccctcctctcggagaggctccatcggaacctccttaagcgcctcgagggggaggagaagctcctttggctctaccacgaggtggaaaagcccctctcccgggtcctggcccacatggaggccaccggggtacggcgggacgtggcctaccttcaggccctttccctggagcttgcggaggagatccgccgcctcgaggaggaggtcttccgcttggcgggccaccccttcaacctcaactcccgggaccagctggaaagggtgctctttgacgagcttaggcttcccgccttggggaagacgcaaaagacaggcaagcgctccaccagcgccgcggtgctggaggccctacgggaggcccaccccatcgtggagaagatcctccagcaccgggagctcaccaagctcaagaacacctacgtggaccccctcccaagcctcgtccacccgaggacgggccgcctccacacccgcttcaaccagacgattacggccacggggaggcttagtagctccgaccccaacctgcagaacatccccgtccgcacccccttgggccagaggatccgccgggccttcgtggccgaggcgggttgggcgttggtggccctggactatagccagatagagctccgcgtcctcgcccacctctccggggacgaaaacctgatcagggtcttccaggaggggaaggacatccacacccagaccgcaagctggatgttcggcgtccccccggaggccgtggaccccctgatgcgccgggcggccaagacggtgaacttcggcgtcctctacggcatgtccgcccataggctctcccaggagcttgccatcccctacgaggaggcggtggcctttatagagcgctacttccaaagcttccccaaggtgcgggcctggatagaaaagaccctggaggaggggaggaagcggggctacgtggaaaccctcttcggaagaaggcgctacgtgcccgacctcaacgcccgggtgaagagcgtcagggaggccgcggagcgcatggccttcaacatgcccgtccagggcaccgccgccgacctcatgaagctcgccatggtgaagctcttcccccgcctccgggagatgggggcccgcatgctcctccaggtccacgacgagctcctcctggaggccccccaagcgcgggccgaggaggtggcggctttggccaaggaggccatggagaaggcctatcccctcgccgtgcccctggaggtggaggtggggatgggggaggactggctttccgccaagggttaggggggccctgccgtttagaggaagttcaaggggttgtccctcagaaacgcctccaggggaacgccctctgggcctaccaggaggcctttagccccaaaggtgcgggtgaaggcttccaggccctggg

SEQ ID NO: 3516 - DNA, 3221 bp, Artificial Sequence
  Description of Artificial Sequence: Synthetic DNA sequence of Thermus thermophilus DNA Polymerase A570L
tctagaggaagcatgagcctcaccctggcagacaaggtggtctacgaggaggagatccagaaaagccgcttcatcgccaaggcggcccccgtggcctcggaggaggaggccttggcgtttttggccgagaaccgggagcctgaggccacccacaacggccacgcctacaagatcggcctcctctaccgcttctctgacgacggggagccctcgggcaccgcaggcaggcccatcctccacgccatagaggcccagggcctggaccgggtggcggtcctggtggtgcgctacttcggcggggtgaagctcggggccggggggcttgtgcgggcctacgggggggtggcggcggaggccttaaggcgggcgcccaaggtccccttggtggagcgggtggggctcgccttcctcgtgcccttcgccgaggtgggccgggtctacgccctcctggaggcccgcgcccctgaaggccgaggagacctacaccccggaggcgtgcgcttcgccctcctcctccccaagcccgagcgggaaggtttcctcagggcgctcctggacgccacccggggacaggtggccctggagtagcatggaggcgatgcttccgctctttgaacccaaaggccgggtcctcctggtggacggccaccacctggcctaccgcaccttcttcgccctgaagggcctcaccacgagccggggcgaaccggtgcaggcggtctacggcttcgccaagagcctcctcaaggccctgaaggaggacgggtacaaggccgtcttcgtggtctttgacgccaaggccccctccttccgccacgaggcctacgaggcctacaaggcggggagggccccgacccccgaggacttcccccggcagctcgccctcatcaaggagctggtggacctcctggggtttacccgcctcgaggtccccggctacgaggcggacgacgttctcgccaccctggccaagaaggcggaaaaggaggggtacgaggtgcgcatcctcaccgccgaccgcgacctctaccaactcgtctccgaccgcgtcgccgtcctccaccccgagggccacctcatcaccccggagtggctttgggagaagtacggcctcaggccggagcagtgggtggacttccgcgccctcgtgggggacccctccgacaacctccccggggtcaagggcatcggggagaagaccgccctcaagctcctcaaggagtggggaagcctggaaaacctcctcaagaacctggaccgggtaaagccagaaaacgtccgggagaagatcaaggcccacctggaagacctcaggctctccttggagctctcccgggtgcgcaccgacctccccctggaggtggacctcgcccaggggcgggagcccgaccgggaggggcttagggccttcctggagaggctggagttcggcagcctcctccacgagttcggcctcctggaggcccccgcccccctggaggaggccccctggcccccgccggaaggggccttcgtgggcttcgtcctctcccgccccgagcccatgtgggcggagcttaaagccctggccgcctgcagggacggccgggtgcaccgggcagcagaccccttggcggggctaaaggacctcaaggaggtccggggcctcctcgccaaggacctcgccgtcttggcctcgagggaggggctagacctcgtgcccggggacgaccccatgctcctcgcctacctcctggacccctccaacaccacccccgagggggtggcgcggcgctacgggggggagtggacggaggacgccgcccaccgggccctcctctcggagaggctccatcggaacctccttaagcgcctcgagggggaggagaagctcctttggctctaccacgaggtggaaaagcccctctcccgggtcctggcccacatggaggccaccggggtacggcgggacgtggcctaccttcaggccctttccctggagcttgcggaggagatccgccgcctcgaggaggaggtcttccgcttggcgggccaccccttcaacctcaactcccgggaccagctggaaagggtgctctttgacgagcttaggcttcccgccttggggaagacgcaaaagacaggcaagcgctccaccagcgccgcggtgctggaggccctacgggaggcccaccccatcgtggagaagatcctccagcaccgggagctcaccaagctcaagaacacctacgtggaccccctcccaagcctcgtccacccgaggacgggccgcctccacacccgcttcaaccagacgcttacggccacggggaggcttagtagctccgaccccaacctgcagaacatccccgtccgcacccccttgggccagaggatccgccgggccttcgtggccgaggcgggttgggcgttggtggccctggactatagccagatagagctccgcgtcctcgcccacctctccggggacgaaaacctgatcagggtcttccaggaggggaaggacatccacacccagaccgcaagctggatgttcggcgtccccccggaggccgtggaccccctgatgcgccgggcggccaagacggtgaacttcggcgtcctctacggcatgtccgcccataggctctcccaggagcttgccatcccctacgaggaggcggtggcctttatagagcgctacttccaaagcttccccaaggtgcgggcctggatagaaaagaccctggaggaggggaggaagcggggctacgtggaaaccctcttcggaagaaggcgctacgtgcccgacctcaacgcccgggtgaagagcgtcagggaggccgcggagcgcatggccttcaacatgcccgtccagggcaccgccgccgacctcatgaagctcgccatggtgaagctcttcccccgcctccgggagatgggggcccgcatgctcctccaggtccacgacgagctcctcctggaggccccccaagcgcgggccgaggaggtggcggctttggccaaggaggccatggagaaggcctatcccctcgccgtgcccctggaggtggaggtggggatgggggaggactggctttccgccaagggttaggggggccctgccgtttagaggaagttcaaggggttgtccctcagaaacgcctccaggggaacgccctctgggcctaccaggaggcctttagccccaaaggtgcgggtgaaggcttccaggccctggg

SEQ ID NO: 3517 - DNA, 3221 bp, Artificial Sequence
  Description of Artificial Sequence: Synthetic DNA sequence of Thermus thermophilus DNA Polymerase A570K
tctagaggaagcatgagcctcaccctggcagacaaggtggtctacgaggaggagatccagaaaagccgcttcatcgccaaggcggcccccgtggcctcggaggaggaggccttggcgtttttggccgagaaccgggagcctgaggccacccacaacggccacgcctacaagatcggcctcctctaccgcttctctgacgacggggagccctcgggcaccgcaggcaggcccatcctccacgccatagaggcccagggcctggaccgggtggcggtcctggtggtgcgctacttcggcggggtgaagctcggggccggggggcttgtgcgggcctacgggggggtggcggcggaggccttaaggcgggcgcccaaggtccccttggtggagcgggtggggctcgccttcctcgtgcccttcgccgaggtgggccgggtctacgccctcctggaggcccgcgcccctgaaggccgaggagacctacaccccggaggcgtgcgcttcgccctcctcctccccaagcccgagcgggaaggtttcctcagggcgctcctggacgccacccggggacaggtggccctggagtagcatggaggcgatgcttccgctctttgaacccaaaggccgggtcctcctggtggacggccaccacctggcctaccgcaccttcttcgccctgaagggcctcaccacgagccggggcgaaccggtgcaggcggtctacggcttcgccaagagcctcctcaaggccctgaaggaggacgggtacaaggccgtcttcgtggtctttgacgccaaggccccctccttccgccacgaggcctacgaggcctacaaggcggggagggccccgacccccgaggacttcccccggcagctcgccctcatcaaggagctggtggacctcctggggtttacccgcctcgaggtccccggctacgaggcggacgacgttctcgccaccctggccaagaaggcggaaaaggaggggtacgaggtgcgcatcctcaccgccgaccgcgacctctaccaactcgtctccgaccgcgtcgccgtcctccaccccgagggccacctcatcaccccggagtggctttgggagaagtacggcctcaggccggagcagtgggtggacttccgcgccctcgtgggggacccctccgacaacctccccggggtcaagggcatcggggagaagaccgccctcaagctcctcaaggagtggggaagcctggaaaacctcctcaagaacctggaccgggtaaagccagaaaacgtccgggagaagatcaaggcccacctggaagacctcaggctctccttggagctctcccgggtgcgcaccgacctccccctggaggtggacctcgcccaggggcgggagcccgaccgggaggggcttagggccttcctggagaggctggagttcggcagcctcctccacgagttcggcctcctggaggcccccgcccccctggaggaggccccctggcccccgccggaaggggccttcgtgggcttcgtcctctcccgccccgagcccatgtgggcggagcttaaagccctggccgcctgcagggacggccgggtgcaccgggcagcagaccccttggcggggctaaaggacctcaaggaggtccggggcctcctcgccaaggacctcgccgtcttggcctcgagggaggggctagacctcgtgcccggggacgaccccatgctcctcgcctacctcctggacccctccaacaccacccccgagggggtggcgcggcgctacgggggggagtggacggaggacgccgcccaccgggccctcctctcggagaggctccatcggaacctccttaagcgcctcgagggggaggagaagctcctttggctctaccacgaggtggaaaagcccctctcccgggtcctggcccacatggaggccaccggggtacggcgggacgtggcctaccttcaggccctttccctggagcttgcggaggagatccgccgcctcgaggaggaggtcttccgcttggcgggccaccccttcaacctcaactcccgggaccagctggaaagggtgctctttgacgagcttaggcttcccgccttggggaagacgcaaaagacaggcaagcgctccaccagcgccgcggtgctggaggccctacgggaggcccaccccatcgtggagaagatcctccagcaccgggagctcaccaagctcaagaacacctacgtggaccccctcccaagcctcgtccacccgaggacgggccgcctccacacccgcttcaaccagacgaaaacggccacggggaggcttagtagctccgaccccaacctgcagaacatccccgtccgcacccccttgggccagaggatccgccgggccttcgtggccgaggcgggttgggcgttggtggccctggactatagccagatagagctccgcgtcctcgcccacctctccggggacgaaaacctgatcagggtcttccaggaggggaaggacatccacacccagaccgcaagctggatgttcggcgtccccccggaggccgtggaccccctgatgcgccgggcggccaagacggtgaacttcggcgtcctctacggcatgtccgcccataggctctcccaggagcttgccatcccctacgaggaggcggtggcctttatagagcgctacttccaaagcttccccaaggtgcgggcctggatagaaaagaccctggaggaggggaggaagcggggctacgtggaaaccctcttcggaagaaggcgctacgtgcccgacctcaacgcccgggtgaagagcgtcagggaggccgcggagcgcatggccttcaacatgcccgtccagggcaccgccgccgacctcatgaagctcgccatggtgaagctcttcccccgcctccgggagatgggggcccgcatgctcctccaggtccacgacgagctcctcctggaggccccccaagcgcgggccgaggaggtggcggctttggccaaggaggccatggagaaggcctatcccctcgccgtgcccctggaggtggaggtggggatgggggaggactggctttccgccaagggttaggggggccctgccgtttagaggaagttcaaggggttgtccctcagaaacgcctccaggggaacgccctctgggcctaccaggaggcctttagccccaaaggtgcgggtgaaggcttccaggccctggg

SEQ ID NO: 3518 - DNA, 3221 bp, Artificial Sequence
  Description of Artificial Sequence: Synthetic DNA sequence of Thermus thermophilus DNA Polymerase A570M
tctagaggaagcatgagcctcaccctggcagacaaggtggtctacgaggaggagatccagaaaagccgcttcatcgccaaggcggcccccgtggcctcggaggaggaggccttggcgtttttggccgagaaccgggagcctgaggccacccacaacggccacgcctacaagatcggcctcctctaccgcttctctgacgacggggagccctcgggcaccgcaggcaggcccatcctccacgccatagaggcccagggcctggaccgggtggcggtcctggtggtgcgctacttcggcggggtgaagctcggggccggggggcttgtgcgggcctacgggggggtggcggcggaggccttaaggcgggcgcccaaggtccccttggtggagcgggtggggctcgccttcctcgtgcccttcgccgaggtgggccgggtctacgccctcctggaggcccgcgcccctgaaggccgaggagacctacaccccggaggcgtgcgcttcgccctcctcctccccaagcccgagcgggaaggtttcctcagggcgctcctggacgccacccggggacaggtggccctggagtagcatggaggcgatgcttccgctctttgaacccaaaggccgggtcctcctggtggacggccaccacctggcctaccgcaccttcttcgccctgaagggcctcaccacgagccggggcgaaccggtgcaggcggtctacggcttcgccaagagcctcctcaaggccctgaaggaggacgggtacaaggccgtcttcgtggtctttgacgccaaggccccctccttccgccacgaggcctacgaggcctacaaggcggggagggccccgacccccgaggacttcccccggcagctcgccctcatcaaggagctggtggacctcctggggtttacccgcctcgaggtccccggctacgaggcggacgacgttctcgccaccctggccaagaaggcggaaaaggaggggtacgaggtgcgcatcctcaccgccgaccgcgacctctaccaactcgtctccgaccgcgtcgccgtcctccaccccgagggccacctcatcaccccggagtggctttgggagaagtacggcctcaggccggagcagtgggtggacttccgcgccctcgtgggggacccctccgacaacctccccggggtcaagggcatcggggagaagaccgccctcaagctcctcaaggagtggggaagcctggaaaacctcctcaagaacctggaccgggtaaagccagaaaacgtccgggagaagatcaaggcccacctggaagacctcaggctctccttggagctctcccgggtgcgcaccgacctccccctggaggtggacctcgcccaggggcgggagcccgaccgggaggggcttagggccttcctggagaggctggagttcggcagcctcctccacgagttcggcctcctggaggcccccgcccccctggaggaggccccctggcccccgccggaaggggccttcgtgggcttcgtcctctcccgccccgagcccatgtgggcggagcttaaagccctggccgcctgcagggacggccgggtgcaccgggcagcagaccccttggcggggctaaaggacctcaaggaggtccggggcctcctcgccaaggacctcgccgtcttggcctcgagggaggggctagacctcgtgcccggggacgaccccatgctcctcgcctacctcctggacccctccaacaccacccccgagggggtggcgcggcgctacgggggggagtggacggaggacgccgcccaccgggccctcctctcggagaggctccatcggaacctccttaagcgcctcgagggggaggagaagctcctttggctctaccacgaggtggaaaagcccctctcccgggtcctggcccacatggaggccaccggggtacggcgggacgtggcctaccttcaggccctttccctggagcttgcggaggagatccgccgcctcgaggaggaggtcttccgcttggcgggccaccccttcaacctcaactcccgggaccagctggaaagggtgctctttgacgagcttaggcttcccgccttggggaagacgcaaaagacaggcaagcgctccaccagcgccgcggtgctggaggccctacgggaggcccaccccatcgtggagaagatcctccagcaccgggagctcaccaagctcaagaacacctacgtggaccccctcccaagcctcgtccacccgaggacgggccgcctccacacccgcttcaaccagacgatgacggccacggggaggcttagtagctccgaccccaacctgcagaacatccccgtccgcacccccttgggccagaggatccgccgggccttcgtggccgaggcgggttgggcgttggtggccctggactatagccagatagagctccgcgtcctcgcccacctctccggggacgaaaacctgatcagggtcttccaggaggggaaggacatccacacccagaccgcaagctggatgttcggcgtccccccggaggccgtggaccccctgatgcgccgggcggccaagacggtgaacttcggcgtcctctacggcatgtccgcccataggctctcccaggagcttgccatcccctacgaggaggcggtggcctttatagagcgctacttccaaagcttccccaaggtgcgggcctggatagaaaagaccctggaggaggggaggaagcggggctacgtggaaaccctcttcggaagaaggcgctacgtgcccgacctcaacgcccgggtgaagagcgtcagggaggccgcggagcgcatggccttcaacatgcccgtccagggcaccgccgccgacctcatgaagctcgccatggtgaagctcttcccccgcctccgggagatgggggcccgcatgctcctccaggtccacgacgagctcctcctggaggccccccaagcgcgggccgaggaggtggcggctttggccaaggaggccatggagaaggcctatcccctcgccgtgcccctggaggtggaggtggggatgggggaggactggctttccgccaagggttaggggggccctgccgtttagaggaagttcaaggggttgtccctcagaaacgcctccaggggaacgccctctgggcctaccaggaggcctttagccccaaaggtgcgggtgaaggcttccaggccctggg

SEQ ID NO: 3519 - DNA, 3221 bp, Artificial Sequence
  Description of Artificial Sequence: Synthetic DNA sequence of Thermus thermophilus DNA Polymerase A570F
tctagaggaagcatgagcctcaccctggcagacaaggtggtctacgaggaggagatccagaaaagccgcttcatcgccaaggcggcccccgtggcctcggaggaggaggccttggcgtttttggccgagaaccgggagcctgaggccacccacaacggccacgcctacaagatcggcctcctctaccgcttctctgacgacggggagccctcgggcaccgcaggcaggcccatcctccacgccatagaggcccagggcctggaccgggtggcggtcctggtggtgcgctacttcggcggggtgaagctcggggccggggggcttgtgcgggcctacgggggggtggcggcggaggccttaaggcgggcgcccaaggtccccttggtggagcgggtggggctcgccttcctcgtgcccttcgccgaggtgggccgggtctacgccctcctggaggcccgcgcccctgaaggccgaggagacctacaccccggaggcgtgcgcttcgccctcctcctccccaagcccgagcgggaaggtttcctcagggcgctcctggacgccacccggggacaggtggccctggagtagcatggaggcgatgcttccgctctttgaacccaaaggccgggtcctcctggtggacggccaccacctggcctaccgcaccttcttcgccctgaagggcctcaccacgagccggggcgaaccggtgcaggcggtctacggcttcgccaagagcctcctcaaggccctgaaggaggacgggtacaaggccgtcttcgtggtctttgacgccaaggccccctccttccgccacgaggcctacgaggcctacaaggcggggagggccccgacccccgaggacttcccccggcagctcgccctcatcaaggagctggtggacctcctggggtttacccgcctcgaggtccccggctacgaggcggacgacgttctcgccaccctggccaagaaggcggaaaaggaggggtacgaggtgcgcatcctcaccgccgaccgcgacctctaccaactcgtctccgaccgcgtcgccgtcctccaccccgagggccacctcatcaccccggagtggctttgggagaagtacggcctcaggccggagcagtgggtggacttccgcgccctcgtgggggacccctccgacaacctccccggggtcaagggcatcggggagaagaccgccctcaagctcctcaaggagtggggaagcctggaaaacctcctcaagaacctggaccgggtaaagccagaaaacgtccgggagaagatcaaggcccacctggaagacctcaggctctccttggagctctcccgggtgcgcaccgacctccccctggaggtggacctcgcccaggggcgggagcccgaccgggaggggcttagggccttcctggagaggctggagttcggcagcctcctccacgagttcggcctcctggaggcccccgcccccctggaggaggccccctggcccccgccggaaggggccttcgtgggcttcgtcctctcccgccccgagcccatgtgggcggagcttaaagccctggccgcctgcagggacggccgggtgcaccgggcagcagaccccttggcggggctaaaggacctcaaggaggtccggggcctcctcgccaaggacctcgccgtcttggcctcgagggaggggctagacctcgtgcccggggacgaccccatgctcctcgcctacctcctggacccctccaacaccacccccgagggggtggcgcggcgctacgggggggagtggacggaggacgccgcccaccgggccctcctctcggagaggctccatcggaacctccttaagcgcctcgagggggaggagaagctcctttggctctaccacgaggtggaaaagcccctctcccgggtcctggcccacatggaggccaccggggtacggcgggacgtggcctaccttcaggccctttccctggagcttgcggaggagatccgccgcctcgaggaggaggtcttccgcttggcgggccaccccttcaacctcaactcccgggaccagctggaaagggtgctctttgacgagcttaggcttcccgccttggggaagacgcaaaagacaggcaagcgctccaccagcgccgcggtgctggaggccctacgggaggcccaccccatcgtggagaagatcctccagcaccgggagctcaccaagctcaagaacacctacgtggaccccctcccaagcctcgtccacccgaggacgggccgcctccacacccgcttcaaccagacgtttacggccacggggaggcttagtagctccgaccccaacctgcagaacatccccgtccgcacccccttgggccagaggatccgccgggccttcgtggccgaggcgggttgggcgttggtggccctggactatagccagatagagctccgcgtcctcgcccacctctccggggacgaaaacctgatcagggtcttccaggaggggaaggacatccacacccagaccgcaagctggatgttcggcgtccccccggaggccgtggaccccctgatgcgccgggcggccaagacggtgaacttcggcgtcctctacggcatgtccgcccataggctctcccaggagcttgccatcccctacgaggaggcggtggcctttatagagcgctacttccaaagcttccccaaggtgcgggcctggatagaaaagaccctggaggaggggaggaagcggggctacgtggaaaccctcttcggaagaaggcgctacgtgcccgacctcaacgcccgggtgaagagcgtcagggaggccgcggagcgcatggccttcaacatgcccgtccagggcaccgccgccgacctcatgaagctcgccatggtgaagctcttcccccgcctccgggagatgggggcccgcatgctcctccaggtccacgacgagctcctcctggaggccccccaagcgcgggccgaggaggtggcggctttggccaaggaggccatggagaaggcctatcccctcgccgtgcccctggaggtggaggtggggatgggggaggactggctttccgccaagggttaggggggccctgccgtttagaggaagttcaaggggttgtccctcagaaacgcctccaggggaacgccctctgggcctaccaggaggcctttagccccaaaggtgcgggtgaaggcttccaggccctggg

SEQ ID NO: 3520 - DNA, 3221 bp, Artificial Sequence
  Description of Artificial Sequence: Synthetic DNA sequence of Thermus thermophilus DNA Polymerase A570P
tctagaggaagcatgagcctcaccctggcagacaaggtggtctacgaggaggagatccagaaaagccgcttcatcgccaaggcggcccccgtggcctcggaggaggaggccttggcgtttttggccgagaaccgggagcctgaggccacccacaacggccacgcctacaagatcggcctcctctaccgcttctctgacgacggggagccctcgggcaccgcaggcaggcccatcctccacgccatagaggcccagggcctggaccgggtggcggtcctggtggtgcgctacttcggcggggtgaagctcggggccggggggcttgtgcgggcctacgggggggtggcggcggaggccttaaggcgggcgcccaaggtccccttggtggagcgggtggggctcgccttcctcgtgcccttcgccgaggtgggccgggtctacgccctcctggaggcccgcgcccctgaaggccgaggagacctacaccccggaggcgtgcgcttcgccctcctcctccccaagcccgagcgggaaggtttcctcagggcgctcctggacgccacccggggacaggtggccctggagtagcatggaggcgatgcttccgctctttgaacccaaaggccgggtcctcctggtggacggccaccacctggcctaccgcaccttcttcgccctgaagggcctcaccacgagccggggcgaaccggtgcaggcggtctacggcttcgccaagagcctcctcaaggccctgaaggaggacgggtacaaggccgtcttcgtggtctttgacgccaaggccccctccttccgccacgaggcctacgaggcctacaaggcggggagggccccgacccccgaggacttcccccggcagctcgccctcatcaaggagctggtggacctcctggggtttacccgcctcgaggtccccggctacgaggcggacgacgttctcgccaccctggccaagaaggcggaaaaggaggggtacgaggtgcgcatcctcaccgccgaccgcgacctctaccaactcgtctccgaccgcgtcgccgtcctccaccccgagggccacctcatcaccccggagtggctttgggagaagtacggcctcaggccggagcagtgggtggacttccgcgccctcgtgggggacccctccgacaacctccccggggtcaagggcatcggggagaagaccgccctcaagctcctcaaggagtggggaagcctggaaaacctcctcaagaacctggaccgggtaaagccagaaaacgtccgggagaagatcaaggcccacctggaagacctcaggctctccttggagctctcccgggtgcgcaccgacctccccctggaggtggacctcgcccaggggcgggagcccgaccgggaggggcttagggccttcctggagaggctggagttcggcagcctcctccacgagttcggcctcctggaggcccccgcccccctggaggaggccccctggcccccgccggaaggggccttcgtgggcttcgtcctctcccgccccgagcccatgtgggcggagcttaaagccctggccgcctgcagggacggccgggtgcaccgggcagcagaccccttggcggggctaaaggacctcaaggaggtccggggcctcctcgccaaggacctcgccgtcttggcctcgagggaggggctagacctcgtgcccggggacgaccccatgctcctcgcctacctcctggacccctccaacaccacccccgagggggtggcgcggcgctacgggggggagtggacggaggacgccgcccaccgggccctcctctcggagaggctccatcggaacctccttaagcgcctcgagggggaggagaagctcctttggctctaccacgaggtggaaaagcccctctcccgggtcctggcccacatggaggccaccggggtacggcgggacgtggcctaccttcaggccctttccctggagcttgcggaggagatccgccgcctcgaggaggaggtcttccgcttggcgggccaccccttcaacctcaactcccgggaccagctggaaagggtgctctttgacgagcttaggcttcccgccttggggaagacgcaaaagacaggcaagcgctccaccagcgccgcggtgctggaggccctacgggaggcccaccccatcgtggagaagatcctccagcaccgggagctcaccaagctcaagaacacctacgtggaccccctcccaagcctcgtccacccgaggacgggccgcctccacacccgcttcaaccagacgcctacggccacggggaggcttagtagctccgaccccaacctgcagaacatccccgtccgcacccccttgggccagaggatccgccgggccttcgtggccgaggcgggttgggcgttggtggccctggactatagccagatagagctccgcgtcctcgcccacctctccggggacgaaaacctgatcagggtcttccaggaggggaaggacatccacacccagaccgcaagctggatgttcggcgtccccccggaggccgtggaccccctgatgcgccgggcggccaagacggtgaacttcggcgtcctctacggcatgtccgcccataggctctcccaggagcttgccatcccctacgaggaggcggtggcctttatagagcgctacttccaaagcttccccaaggtgcgggcctggatagaaaagaccctggaggaggggaggaagcggggctacgtggaaaccctcttcggaagaaggcgctacgtgcccgacctcaacgcccgggtgaagagcgtcagggaggccgcggagcgcatggccttcaacatgcccgtccagggcaccgccgccgacctcatgaagctcgccatggtgaagctcttcccccgcctccgggagatgggggcccgcatgctcctccaggtccacgacgagctcctcctggaggccccccaagcgcgggccgaggaggtggcggctttggccaaggaggccatggagaaggcctatcccctcgccgtgcccctggaggtggaggtggggatgggggaggactggctttccgccaagggttaggggggccctgccgtttagaggaagttcaaggggttgtccctcagaaacgcctccaggggaacgccctctgggcctaccaggaggcctttagccccaaaggtgcgggtgaaggcttccaggccctggg

SEQ ID NO: 3521 - DNA, 3221 bp, Artificial Sequence
  Description of Artificial Sequence: Synthetic DNA sequence of Thermus thermophilus DNA Polymerase A570S
tctagaggaagcatgagcctcaccctggcagacaaggtggtctacgaggaggagatccagaaaagccgcttcatcgccaaggcggcccccgtggcctcggaggaggaggccttggcgtttttggccgagaaccgggagcctgaggccacccacaacggccacgcctacaagatcggcctcctctaccgcttctctgacgacggggagccctcgggcaccgcaggcaggcccatcctccacgccatagaggcccagggcctggaccgggtggcggtcctggtggtgcgctacttcggcggggtgaagctcggggccggggggcttgtgcgggcctacgggggggtggcggcggaggccttaaggcgggcgcccaaggtccccttggtggagcgggtggggctcgccttcctcgtgcccttcgccgaggtgggccgggtctacgccctcctggaggcccgcgcccctgaaggccgaggagacctacaccccggaggcgtgcgcttcgccctcctcctccccaagcccgagcgggaaggtttcctcagggcgctcctggacgccacccggggacaggtggccctggagtagcatggaggcgatgcttccgctctttgaacccaaaggccgggtcctcctggtggacggccaccacctggcctaccgcaccttcttcgccctgaagggcctcaccacgagccggggcgaaccggtgcaggcggtctacggcttcgccaagagcctcctcaaggccctgaaggaggacgggtacaaggccgtcttcgtggtctttgacgccaaggccccctccttccgccacgaggcctacgaggcctacaaggcggggagggccccgacccccgaggacttcccccggcagctcgccctcatcaaggagctggtggacctcctggggtttacccgcctcgaggtccccggctacgaggcggacgacgttctcgccaccctggccaagaaggcggaaaaggaggggtacgaggtgcgcatcctcaccgccgaccgcgacctctaccaactcgtctccgaccgcgtcgccgtcctccaccccgagggccacctcatcaccccggagtggctttgggagaagtacggcctcaggccggagcagtgggtggacttccgcgccctcgtgggggacccctccgacaacctccccggggtcaagggcatcggggagaagaccgccctcaagctcctcaaggagtggggaagcctggaaaacctcctcaagaacctggaccgggtaaagccagaaaacgtccgggagaagatcaaggcccacctggaagacctcaggctctccttggagctctcccgggtgcgcaccgacctccccctggaggtggacctcgcccaggggcgggagcccgaccgggaggggcttagggccttcctggagaggctggagttcggcagcctcctccacgagttcggcctcctggaggcccccgcccccctggaggaggccccctggcccccgccggaaggggccttcgtgggcttcgtcctctcccgccccgagcccatgtgggcggagcttaaagccctggccgcctgcagggacggccgggtgcaccgggcagcagaccccttggcggggctaaaggacctcaaggaggtccggggcctcctcgccaaggacctcgccgtcttggcctcgagggaggggctagacctcgtgcccggggacgaccccatgctcctcgcctacctcctggacccctccaacaccacccccgagggggtggcgcggcgctacgggggggagtggacggaggacgccgcccaccgggccctcctctcggagaggctccatcggaacctccttaagcgcctcgagggggaggagaagctcctttggctctaccacgaggtggaaaagcccctctcccgggtcctggcccacatggaggccaccggggtacggcgggacgtggcctaccttcaggccctttccctggagcttgcggaggagatccgccgcctcgaggaggaggtcttccgcttggcgggccaccccttcaacctcaactcccgggaccagctggaaagggtgctctttgacgagcttaggcttcccgccttggggaagacgcaaaagacaggcaagcgctccaccagcgccgcggtgctggaggccctacgggaggcccaccccatcgtggagaagatcctccagcaccgggagctcaccaagctcaagaacacctacgtggaccccctcccaagcctcgtccacccgaggacgggccgcctccacacccgcttcaaccagacgtctacggccacggggaggcttagtagctccgaccccaacctgcagaacatccccgtccgcacccccttgggccagaggatccgccgggccttcgtggccgaggcgggttgggcgttggtggccctggactatagccagatagagctccgcgtcctcgcccacctctccggggacgaaaacctgatcagggtcttccaggaggggaaggacatccacacccagaccgcaagctggatgttcggcgtccccccggaggccgtggaccccctgatgcgccgggcggccaagacggtgaacttcggcgtcctctacggcatgtccgcccataggctctcccaggagcttgccatcccctacgaggaggcggtggcctttatagagcgctacttccaaagcttccccaaggtgcgggcctggatagaaaagaccctggaggaggggaggaagcggggctacgtggaaaccctcttcggaagaaggcgctacgtgcccgacctcaacgcccgggtgaagagcgtcagggaggccgcggagcgcatggccttcaacatgcccgtccagggcaccgccgccgacctcatgaagctcgccatggtgaagctcttcccccgcctccgggagatgggggcccgcatgctcctccaggtccacgacgagctcctcctggaggccccccaagcgcgggccgaggaggtggcggctttggccaaggaggccatggagaaggcctatcccctcgccgtgcccctggaggtggaggtggggatgggggaggactggctttccgccaagggttaggggggccctgccgtttagaggaagttcaaggggttgtccctcagaaacgcctccaggggaacgccctctgggcctaccaggaggcctttagccccaaaggtgcgggtgaaggcttccaggccctggg

SEQ ID NO: 3522 - DNA, 3221 bp, Artificial Sequence
  Description of Artificial Sequence: Synthetic DNA sequence of Thermus thermophilus DNA Polymerase A570T
tctagaggaagcatgagcctcaccctggcagacaaggtggtctacgaggaggagatccagaaaagccgcttcatcgccaaggcggcccccgtggcctcggaggaggaggccttggcgtttttggccgagaaccgggagcctgaggccacccacaacggccacgcctacaagatcggcctcctctaccgcttctctgacgacggggagccctcgggcaccgcaggcaggcccatcctccacgccatagaggcccagggcctggaccgggtggcggtcctggtggtgcgctacttcggcggggtgaagctcggggccggggggcttgtgcgggcctacgggggggtggcggcggaggccttaaggcgggcgcccaaggtccccttggtggagcgggtggggctcgccttcctcgtgcccttcgccgaggtgggccgggtctacgccctcctggaggcccgcgcccctgaaggccgaggagacctacaccccggaggcgtgcgcttcgccctcctcctccccaagcccgagcgggaaggtttcctcagggcgctcctggacgccacccggggacaggtggccctggagtagcatggaggcgatgcttccgctctttgaacccaaaggccgggtcctcctggtggacggccaccacctggcctaccgcaccttcttcgccctgaagggcctcaccacgagccggggcgaaccggtgcaggcggtctacggcttcgccaagagcctcctcaaggccctgaaggaggacgggtacaaggccgtcttcgtggtctttgacgccaaggccccctccttccgccacgaggcctacgaggcctacaaggcggggagggccccgacccccgaggacttcccccggcagctcgccctcatcaaggagctggtggacctcctggggtttacccgcctcgaggtccccggctacgaggcggacgacgttctcgccaccctggccaagaaggcggaaaaggaggggtacgaggtgcgcatcctcaccgccgaccgcgacctctaccaactcgtctccgaccgcgtcgccgtcctccaccccgagggccacctcatcaccccggagtggctttgggagaagtacggcctcaggccggagcagtgggtggacttccgcgccctcgtgggggacccctccgacaacctccccggggtcaagggcatcggggagaagaccgccctcaagctcctcaaggagtggggaagcctggaaaacctcctcaagaacctggaccgggtaaagccagaaaacgtccgggagaagatcaaggcccacctggaagacctcaggctctccttggagctctcccgggtgcgcaccgacctccccctggaggtggacctcgcccaggggcgggagcccgaccgggaggggcttagggccttcctggagaggctggagttcggcagcctcctccacgagttcggcctcctggaggcccccgcccccctggaggaggccccctggcccccgccggaaggggccttcgtgggcttcgtcctctcccgccccgagcccatgtgggcggagcttaaagccctggccgcctgcagggacggccgggtgcaccgggcagcagaccccttggcggggctaaaggacctcaaggaggtccggggcctcctcgccaaggacctcgccgtcttggcctcgagggaggggctagacctcgtgcccggggacgaccccatgctcctcgcctacctcctggacccctccaacaccacccccgagggggtggcgcggcgctacgggggggagtggacggaggacgccgcccaccgggccctcctctcggagaggctccatcggaacctccttaagcgcctcgagggggaggagaagctcctttggctctaccacgaggtggaaaagcccctctcccgggtcctggcccacatggaggccaccggggtacggcgggacgtggcctaccttcaggccctttccctggagcttgcggaggagatccgccgcctcgaggaggaggtcttccgcttggcgggccaccccttcaacctcaactcccgggaccagctggaaagggtgctctttgacgagcttaggcttcccgccttggggaagacgcaaaagacaggcaagcgctccaccagcgccgcggtgctggaggccctacgggaggcccaccccatcgtggagaagatcctccagcaccgggagctcaccaagctcaagaacacctacgtggaccccctcccaagcctcgtccacccgaggacgggccgcctccacacccgcttcaaccagacgactacggccacggggaggcttagtagctccgaccccaacctgcagaacatccccgtccgcacccccttgggccagaggatccgccgggccttcgtggccgaggcgggttgggcgttggtggccctggactatagccagatagagctccgcgtcctcgcccacctctccggggacgaaaacctgatcagggtcttccaggaggggaaggacatccacacccagaccgcaagctggatgttcggcgtccccccggaggccgtggaccccctgatgcgccgggcggccaagacggtgaacttcggcgtcctctacggcatgtccgcccataggctctcccaggagcttgccatcccctacgaggaggcggtggcctttatagagcgctacttccaaagcttccccaaggtgcgggcctggatagaaaagaccctggaggaggggaggaagcggggctacgtggaaaccctcttcggaagaaggcgctacgtgcccgacctcaacgcccgggtgaagagcgtcagggaggccgcggagcgcatggccttcaacatgcccgtccagggcaccgccgccgacctcatgaagctcgccatggtgaagctcttcccccgcctccgggagatgggggcccgcatgctcctccaggtccacgacgagctcctcctggaggccccccaagcgcgggccgaggaggtggcggctttggccaaggaggccatggagaaggcctatcccctcgccgtgcccctggaggtggaggtggggatgggggaggactggctttccgccaagggttaggggggccctgccgtttagaggaagttcaaggggttgtccctcagaaacgcctccaggggaacgccctctgggcctaccaggaggcctttagccccaaaggtgcgggtgaaggcttccaggccctggg

SEQ ID NO: 3523 - DNA, 3221 bp, Artificial Sequence
  Description of Artificial Sequence: Synthetic DNA sequence of Thermus thermophilus DNA Polymerase A570W
tctagaggaagcatgagcctcaccctggcagacaaggtggtctacgaggaggagatccagaaaagccgcttcatcgccaaggcggcccccgtggcctcggaggaggaggccttggcgtttttggccgagaaccgggagcctgaggccacccacaacggccacgcctacaagatcggcctcctctaccgcttctctgacgacggggagccctcgggcaccgcaggcaggcccatcctccacgccatagaggcccagggcctggaccgggtggcggtcctggtggtgcgctacttcggcggggtgaagctcggggccggggggcttgtgcgggcctacgggggggtggcggcggaggccttaaggcgggcgcccaaggtccccttggtggagcgggtggggctcgccttcctcgtgcccttcgccgaggtgggccgggtctacgccctcctggaggcccgcgcccctgaaggccgaggagacctacaccccggaggcgtgcgcttcgccctcctcctccccaagcccgagcgggaaggtttcctcagggcgctcctggacgccacccggggacaggtggccctggagtagcatggaggcgatgcttccgctctttgaacccaaaggccgggtcctcctggtggacggccaccacctggcctaccgcaccttcttcgccctgaagggcctcaccacgagccggggcgaaccggtgcaggcggtctacggcttcgccaagagcctcctcaaggccctgaaggaggacgggtacaaggccgtcttcgtggtctttgacgccaaggccccctccttccgccacgaggcctacgaggcctacaaggcggggagggccccgacccccgaggacttcccccggcagctcgccctcatcaaggagctggtggacctcctggggtttacccgcctcgaggtccccggctacgaggcggacgacgttctcgccaccctggccaagaaggcggaaaaggaggggtacgaggtgcgcatcctcaccgccgaccgcgacctctaccaactcgtctccgaccgcgtcgccgtcctccaccccgagggccacctcatcaccccggagtggctttgggagaagtacggcctcaggccggagcagtgggtggacttccgcgccctcgtgggggacccctccgacaacctccccggggtcaagggcatcggggagaagaccgccctcaagctcctcaaggagtggggaagcctggaaaacctcctcaagaacctggaccgggtaaagccagaaaacgtccgggagaagatcaaggcccacctggaagacctcaggctctccttggagctctcccgggtgcgcaccgacctccccctggaggtggacctcgcccaggggcgggagcccgaccgggaggggcttagggccttcctggagaggctggagttcggcagcctcctccacgagttcggcctcctggaggcccccgcccccctggaggaggccccctggcccccgccggaaggggccttcgtgggcttcgtcctctcccgccccgagcccatgtgggcggagcttaaagccctggccgcctgcagggacggccgggtgcaccgggcagcagaccccttggcggggctaaaggacctcaaggaggtccggggcctcctcgccaaggacctcgccgtcttggcctcgagggaggggctagacctcgtgcccggggacgaccccatgctcctcgcctacctcctggacccctccaacaccacccccgagggggtggcgcggcgctacgggggggagtggacggaggacgccgcccaccgggccctcctctcggagaggctccatcggaacctccttaagcgcctcgagggggaggagaagctcctttggctctaccacgaggtggaaaagcccctctcccgggtcctggcccacatggaggccaccggggtacggcgggacgtggcctaccttcaggccctttccctggagcttgcggaggagatccgccgcctcgaggaggaggtcttccgcttggcgggccaccccttcaacctcaactcccgggaccagctggaaagggtgctctttgacgagcttaggcttcccgccttggggaagacgcaaaagacaggcaagcgctccaccagcgccgcggtgctggaggccctacgggaggcccaccccatcgtggagaagatcctccagcaccgggagctcaccaagctcaagaacacctacgtggaccccctcccaagcctcgtccacccgaggacgggccgcctccacacccgcttcaaccagacgtggacggccacggggaggcttagtagctccgaccccaacctgcagaacatccccgtccgcacccccttgggccagaggatccgccgggccttcgtggccgaggcgggttgggcgttggtggccctggactatagccagatagagctccgcgtcctcgcccacctctccggggacgaaaacctgatcagggtcttccaggaggggaaggacatccacacccagaccgcaagctggatgttcggcgtccccccggaggccgtggaccccctgatgcgccgggcggccaagacggtgaacttcggcgtcctctacggcatgtccgcccataggctctcccaggagcttgccatcccctacgaggaggcggtggcctttatagagcgctacttccaaagcttccccaaggtgcgggcctggatagaaaagaccctggaggaggggaggaagcggggctacgtggaaaccctcttcggaagaaggcgctacgtgcccgacctcaacgcccgggtgaagagcgtcagggaggccgcggagcgcatggccttcaacatgcccgtccagggcaccgccgccgacctcatgaagctcgccatggtgaagctcttcccccgcctccgggagatgggggcccgcatgctcctccaggtccacgacgagctcctcctggaggccccccaagcgcgggccgaggaggtggcggctttggccaaggaggccatggagaaggcctatcccctcgccgtgcccctggaggtggaggtggggatgggggaggactggctttccgccaagggttaggggggccctgccgtttagaggaagttcaaggggttgtccctcagaaacgcctccaggggaacgccctctgggcctaccaggaggcctttagccccaaaggtgcgggtgaaggcttccaggccctggg

SEQ ID NO: 3524 - DNA, 3221 bp, Artificial Sequence
  Description of Artificial Sequence: Synthetic DNA sequence of Thermus thermophilus DNA Polymerase A570Y
tctagaggaagcatgagcctcaccctggcagacaaggtggtctacgaggaggagatccagaaaagccgcttcatcgccaaggcggcccccgtggcctcggaggaggaggccttggcgtttttggccgagaaccgggagcctgaggccacccacaacggccacgcctacaagatcggcctcctctaccgcttctctgacgacggggagccctcgggcaccgcaggcaggcccatcctccacgccatagaggcccagggcctggaccgggtggcggtcctggtggtgcgctacttcggcggggtgaagctcggggccggggggcttgtgcgggcctacgggggggtggcggcggaggccttaaggcgggcgcccaaggtccccttggtggagcgggtggggctcgccttcctcgtgcccttcgccgaggtgggccgggtctacgccctcctggaggcccgcgcccctgaaggccgaggagacctacaccccggaggcgtgcgcttcgccctcctcctccccaagcccgagcgggaaggtttcctcagggcgctcctggacgccacccggggacaggtggccctggagtagcatggaggcgatgcttccgctctttgaacccaaaggccgggtcctcctggtggacggccaccacctggcctaccgcaccttcttcgccctgaagggcctcaccacgagccggggcgaaccggtgcaggcggtctacggcttcgccaagagcctcctcaaggccctgaaggaggacgggtacaaggccgtcttcgtggtctttgacgccaaggccccctccttccgccacgaggcctacgaggcctacaaggcggggagggccccgacccccgaggacttcccccggcagctcgccctcatcaaggagctggtggacctcctggggtttacccgcctcgaggtccccggctacgaggcggacgacgttctcgccaccctggccaagaaggcggaaaaggaggggtacgaggtgcgcatcctcaccgccgaccgcgacctctaccaactcgtctccgaccgcgtcgccgtcctccaccccgagggccacctcatcaccccggagtggctttgggagaagtacggcctcaggccggagcagtgggtggacttccgcgccctcgtgggggacccctccgacaacctccccggggtcaagggcatcggggagaagaccgccctcaagctcctcaaggagtggggaagcctggaaaacctcctcaagaacctggaccgggtaaagccagaaaacgtccgggagaagatcaaggcccacctggaagacctcaggctctccttggagctctcccgggtgcgcaccgacctccccctggaggtggacctcgcccaggggcgggagcccgaccgggaggggcttagggccttcctggagaggctggagttcggcagcctcctccacgagttcggcctcctggaggcccccgcccccctggaggaggccccctggcccccgccggaaggggccttcgtgggcttcgtcctctcccgccccgagcccatgtgggcggagcttaaagccctggccgcctgcagggacggccgggtgcaccgggcagcagaccccttggcggggctaaaggacctcaaggaggtccggggcctcctcgccaaggacctcgccgtcttggcctcgagggaggggctagacctcgtgcccggggacgaccccatgctcctcgcctacctcctggacccctccaacaccacccccgagggggtggcgcggcgctacgggggggagtggacggaggacgccgcccaccgggccctcctctcggagaggctccatcggaacctccttaagcgcctcgagggggaggagaagctcctttggctctaccacgaggtggaaaagcccctctcccgggtcctggcccacatggaggccaccggggtacggcgggacgtggcctaccttcaggccctttccctggagcttgcggaggagatccgccgcctcgaggaggaggtcttccgcttggcgggccaccccttcaacctcaactcccgggaccagctggaaagggtgctctttgacgagcttaggcttcccgccttggggaagacgcaaaagacaggcaagcgctccaccagcgccgcggtgctggaggccctacgggaggcccaccccatcgtggagaagatcctccagcaccgggagctcaccaagctcaagaacacctacgtggaccccctcccaagcctcgtccacccgaggacgggccgcctccacacccgcttcaaccagacgtatacggccacggggaggcttagtagctccgaccccaacctgcagaacatccccgtccgcacccccttgggccagaggatccgccgggccttcgtggccgaggcgggttgggcgttggtggccctggactatagccagatagagctccgcgtcctcgcccacctctccggggacgaaaacctgatcagggtcttccaggaggggaaggacatccacacccagaccgcaagctggatgttcggcgtccccccggaggccgtggaccccctgatgcgccgggcggccaagacggtgaacttcggcgtcctctacggcatgtccgcccataggctctcccaggagcttgccatcccctacgaggaggcggtggcctttatagagcgctacttccaaagcttccccaaggtgcgggcctggatagaaaagaccctggaggaggggaggaagcggggctacgtggaaaccctcttcggaagaaggcgctacgtgcccgacctcaacgcccgggtgaagagcgtcagggaggccgcggagcgcatggccttcaacatgcccgtccagggcaccgccgccgacctcatgaagctcgccatggtgaagctcttcccccgcctccgggagatgggggcccgcatgctcctccaggtccacgacgagctcctcctggaggccccccaagcgcgggccgaggaggtggcggctttggccaaggaggccatggagaaggcctatcccctcgccgtgcccctggaggtggaggtggggatgggggaggactggctttccgccaagggttaggggggccctgccgtttagaggaagttcaaggggttgtccctcagaaacgcctccaggggaacgccctctgggcctaccaggaggcctttagccccaaaggtgcgggtgaaggcttccaggccctggg

SEQ ID NO: 3525 - DNA, 3221 bp, Artificial Sequence
  Description of Artificial Sequence: Synthetic DNA sequence of Thermus thermophilus DNA Polymerase A570V
tctagaggaagcatgagcctcaccctggcagacaaggtggtctacgaggaggagatccagaaaagccgcttcatcgccaaggcggcccccgtggcctcggaggaggaggccttggcgtttttggccgagaaccgggagcctgaggccacccacaacggccacgcctacaagatcggcctcctctaccgcttctctgacgacggggagccctcgggcaccgcaggcaggcccatcctccacgccatagaggcccagggcctggaccgggtggcggtcctggtggtgcgctacttcggcggggtgaagctcggggccggggggcttgtgcgggcctacgggggggtggcggcggaggccttaaggcgggcgcccaaggtccccttggtggagcgggtggggctcgccttcctcgtgcccttcgccgaggtgggccgggtctacgccctcctggaggcccgcgcccctgaaggccgaggagacctacaccccggaggcgtgcgcttcgccctcctcctccccaagcccgagcgggaaggtttcctcagggcgctcctggacgccacccggggacaggtggccctggagtagcatggaggcgatgcttccgctctttgaacccaaaggccgggtcctcctggtggacggccaccacctggcctaccgcaccttcttcgccctgaagggcctcaccacgagccggggcgaaccggtgcaggcggtctacggcttcgccaagagcctcctcaaggccctgaaggaggacgggtacaaggccgtcttcgtggtctttgacgccaaggccccctccttccgccacgaggcctacgaggcctacaaggcggggagggccccgacccccgaggacttcccccggcagctcgccctcatcaaggagctggtggacctcctggggtttacccgcctcgaggtccccggctacgaggcggacgacgttctcgccaccctggccaagaaggcggaaaaggaggggtacgaggtgcgcatcctcaccgccgaccgcgacctctaccaactcgtctccgaccgcgtcgccgtcctccaccccgagggccacctcatcaccccggagtggctttgggagaagtacggcctcaggccggagcagtgggtggacttccgcgccctcgtgggggacccctccgacaacctccccggggtcaagggcatcggggagaagaccgccctcaagctcctcaaggagtggggaagcctggaaaacctcctcaagaacctggaccgggtaaagccagaaaacgtccgggagaagatcaaggcccacctggaagacctcaggctctccttggagctctcccgggtgcgcaccgacctccccctggaggtggacctcgcccaggggcgggagcccgaccgggaggggcttagggccttcctggagaggctggagttcggcagcctcctccacgagttcggcctcctggaggcccccgcccccctggaggaggccccctggcccccgccggaaggggccttcgtgggcttcgtcctctcccgccccgagcccatgtgggcggagcttaaagccctggccgcctgcagggacggccgggtgcaccgggcagcagaccccttggcggggctaaaggacctcaaggaggtccggggcctcctcgccaaggacctcgccgtcttggcctcgagggaggggctagacctcgtgcccggggacgaccccatgctcctcgcctacctcctggacccctccaacaccacccccgagggggtggcgcggcgctacgggggggagtggacggaggacgccgcccaccgggccctcctctcggagaggctccatcggaacctccttaagcgcctcgagggggaggagaagctcctttggctctaccacgaggtggaaaagcccctctcccgggtcctggcccacatggaggccaccggggtacggcgggacgtggcctaccttcaggccctttccctggagcttgcggaggagatccgccgcctcgaggaggaggtcttccgcttggcgggccaccccttcaacctcaactcccgggaccagctggaaagggtgctctttgacgagcttaggcttcccgccttggggaagacgcaaaagacaggcaagcgctccaccagcgccgcggtgctggaggccctacgggaggcccaccccatcgtggagaagatcctccagcaccgggagctcaccaagctcaagaacacctacgtggaccccctcccaagcctcgtccacccgaggacgggccgcctccacacccgcttcaaccagacggttacggccacggggaggcttagtagctccgaccccaacctgcagaacatccccgtccgcacccccttgggccagaggatccgccgggccttcgtggccgaggcgggttgggcgttggtggccctggactatagccagatagagctccgcgtcctcgcccacctctccggggacgaaaacctgatcagggtcttccaggaggggaaggacatccacacccagaccgcaagctggatgttcggcgtccccccggaggccgtggaccccctgatgcgccgggcggccaagacggtgaacttcggcgtcctctacggcatgtccgcccataggctctcccaggagcttgccatcccctacgaggaggcggtggcctttatagagcgctacttccaaagcttccccaaggtgcgggcctggatagaaaagaccctggaggaggggaggaagcggggctacgtggaaaccctcttcggaagaaggcgctacgtgcccgacctcaacgcccgggtgaagagcgtcagggaggccgcggagcgcatggccttcaacatgcccgtccagggcaccgccgccgacctcatgaagctcgccatggtgaagctcttcccccgcctccgggagatgggggcccgcatgctcctccaggtccacgacgagctcctcctggaggccccccaagcgcgggccgaggaggtggcggctttggccaaggaggccatggagaaggcctatcccctcgccgtgcccctggaggtggaggtggggatgggggaggactggctttccgccaagggttaggggggccctgccgtttagaggaagttcaaggggttgtccctcagaaacgcctccaggggaacgccctctgggcctaccaggaggcctttagccccaaaggtgcgggtgaaggcttccaggccctggg

SEQ ID NO: 3526 - DNA, 3221 bp, Artificial Sequence
  Description of Artificial Sequence: Synthetic DNA sequence of Thermus thermophilus DNA Polymerase S579A
tctagaggaagcatgagcctcaccctggcagacaaggtggtctacgaggaggagatccagaaaagccgcttcatcgccaaggcggcccccgtggcctcggaggaggaggccttggcgtttttggccgagaaccgggagcctgaggccacccacaacggccacgcctacaagatcggcctcctctaccgcttctctgacgacggggagccctcgggcaccgcaggcaggcccatcctccacgccatagaggcccagggcctggaccgggtggcggtcctggtggtgcgctacttcggcggggtgaagctcggggccggggggcttgtgcgggcctacgggggggtggcggcggaggccttaaggcgggcgcccaaggtccccttggtggagcgggtggggctcgccttcctcgtgcccttcgccgaggtgggccgggtctacgccctcctggaggcccgcgcccctgaaggccgaggagacctacaccccggaggcgtgcgcttcgccctcctcctccccaagcccgagcgggaaggtttcctcagggcgctcctggacgccacccggggacaggtggccctggagtagcatggaggcgatgcttccgctctttgaacccaaaggccgggtcctcctggtggacggccaccacctggcctaccgcaccttcttcgccctgaagggcctcaccacgagccggggcgaaccggtgcaggcggtctacggcttcgccaagagcctcctcaaggccctgaaggaggacgggtacaaggccgtcttcgtggtctttgacgccaaggccccctccttccgccacgaggcctacgaggcctacaaggcggggagggccccgacccccgaggacttcccccggcagctcgccctcatcaaggagctggtggacctcctggggtttacccgcctcgaggtccccggctacgaggcggacgacgttctcgccaccctggccaagaaggcggaaaaggaggggtacgaggtgcgcatcctcaccgccgaccgcgacctctaccaactcgtctccgaccgcgtcgccgtcctccaccccgagggccacctcatcaccccggagtggctttgggagaagtacggcctcaggccggagcagtgggtggacttccgcgccctcgtgggggacccctccgacaacctccccggggtcaagggcatcggggagaagaccgccctcaagctcctcaaggagtggggaagcctggaaaacctcctcaagaacctggaccgggtaaagccagaaaacgtccgggagaagatcaaggcccacctggaagacctcaggctctccttggagctctcccgggtgcgcaccgacctccccctggaggtggacctcgcccaggggcgggagcccgaccgggaggggcttagggccttcctggagaggctggagttcggcagcctcctccacgagttcggcctcctggaggcccccgcccccctggaggaggccccctggcccccgccggaaggggccttcgtgggcttcgtcctctcccgccccgagcccatgtgggcggagcttaaagccctggccgcctgcagggacggccgggtgcaccgggcagcagaccccttggcggggctaaaggacctcaaggaggtccggggcctcctcgccaaggacctcgccgtcttggcctcgagggaggggctagacctcgtgcccggggacgaccccatgctcctcgcctacctcctggacccctccaacaccacccccgagggggtggcgcggcgctacgggggggagtggacggaggacgccgcccaccgggccctcctctcggagaggctccatcggaacctccttaagcgcctcgagggggaggagaagctcctttggctctaccacgaggtggaaaagcccctctcccgggtcctggcccacatggaggccaccggggtacggcgggacgtggcctaccttcaggccctttccctggagcttgcggaggagatccgccgcctcgaggaggaggtcttccgcttggcgggccaccccttcaacctcaactcccgggaccagctggaaagggtgctctttgacgagcttaggcttcccgccttggggaagacgcaaaagacaggcaagcgctccaccagcgccgcggtgctggaggccctacgggaggcccaccccatcgtggagaagatcctccagcaccgggagctcaccaagctcaagaacacctacgtggaccccctcccaagcctcgtccacccgaggacgggccgcctccacacccgcttcaaccagacggccacggccacggggaggcttagtagcgctgaccccaacctgcagaacatccccgtccgcacccccttgggccagaggatccgccgggccttcgtggccgaggcgggttgggcgttggtggccctggactatagccagatagagctccgcgtcctcgcccacctctccggggacgaaaacctgatcagggtcttccaggaggggaaggacatccacacccagaccgcaagctggatgttcggcgtccccccggaggccgtggaccccctgatgcgccgggcggccaagacggtgaacttcggcgtcctctacggcatgtccgcccataggctctcccaggagcttgccatcccctacgaggaggcggtggcctttatagagcgctacttccaaagcttccccaaggtgcgggcctggatagaaaagaccctggaggaggggaggaagcggggctacgtggaaaccctcttcggaagaaggcgctacgtgcccgacctcaacgcccgggtgaagagcgtcagggaggccgcggagcgcatggccttcaacatgcccgtccagggcaccgccgccgacctcatgaagctcgccatggtgaagctcttcccccgcctccgggagatgggggcccgcatgctcctccaggtccacgacgagctcctcctggaggccccccaagcgcgggccgaggaggtggcggctttggccaaggaggccatggagaaggcctatcccctcgccgtgcccctggaggtggaggtggggatgggggaggactggctttccgccaagggttaggggggccctgccgtttagaggaagttcaaggggttgtccctcagaaacgcctccaggggaacgccctctgggcctaccaggaggcctttagccccaaaggtgcgggtgaaggcttccaggccctggg

SEQ ID NO: 3527 - DNA, 3221 bp, Artificial Sequence
  Description of Artificial Sequence: Synthetic DNA sequence of Thermus thermophilus DNA Polymerase S579R
tctagaggaagcatgagcctcaccctggcagacaaggtggtctacgaggaggagatccagaaaagccgcttcatcgccaaggcggcccccgtggcctcggaggaggaggccttggcgtttttggccgagaaccgggagcctgaggccacccacaacggccacgcctacaagatcggcctcctctaccgcttctctgacgacggggagccctcgggcaccgcaggcaggcccatcctccacgccatagaggcccagggcctggaccgggtggcggtcctggtggtgcgctacttcggcggggtgaagctcggggccggggggcttgtgcgggcctacgggggggtggcggcggaggccttaaggcgggcgcccaaggtccccttggtggagcgggtggggctcgccttcctcgtgcccttcgccgaggtgggccgggtctacgccctcctggaggcccgcgcccctgaaggccgaggagacctacaccccggaggcgtgcgcttcgccctcctcctccccaagcccgagcgggaaggtttcctcagggcgctcctggacgccacccggggacaggtggccctggagtagcatggaggcgatgcttccgctctttgaacccaaaggccgggtcctcctggtggacggccaccacctggcctaccgcaccttcttcgccctgaagggcctcaccacgagccggggcgaaccggtgcaggcggtctacggcttcgccaagagcctcctcaaggccctgaaggaggacgggtacaaggccgtcttcgtggtctttgacgccaaggccccctccttccgccacgaggcctacgaggcctacaaggcggggagggccccgacccccgaggacttcccccggcagctcgccctcatcaaggagctggtggacctcctggggtttacccgcctcgaggtccccggctacgaggcggacgacgttctcgccaccctggccaagaaggcggaaaaggaggggtacgaggtgcgcatcctcaccgccgaccgcgacctctaccaactcgtctccgaccgcgtcgccgtcctccaccccgagggccacctcatcaccccggagtggctttgggagaagtacggcctcaggccggagcagtgggtggacttccgcgccctcgtgggggacccctccgacaacctccccggggtcaagggcatcggggagaagaccgccctcaagctcctcaaggagtggggaagcctggaaaacctcctcaagaacctggaccgggtaaagccagaaaacgtccgggagaagatcaaggcccacctggaagacctcaggctctccttggagctctcccgggtgcgcaccgacctccccctggaggtggacctcgcccaggggcgggagcccgaccgggaggggcttagggccttcctggagaggctggagttcggcagcctcctccacgagttcggcctcctggaggcccccgcccccctggaggaggccccctggcccccgccggaaggggccttcgtgggcttcgtcctctcccgccccgagcccatgtgggcggagcttaaagccctggccgcctgcagggacggccgggtgcaccgggcagcagaccccttggcggggctaaaggacctcaaggaggtccggggcctcctcgccaaggacctcgccgtcttggcctcgagggaggggctagacctcgtgcccggggacgaccccatgctcctcgcctacctcctggacccctccaacaccacccccgagggggtggcgcggcgctacgggggggagtggacggaggacgccgcccaccgggccctcctctcggagaggctccatcggaacctccttaagcgcctcgagggggaggagaagctcctttggctctaccacgaggtggaaaagcccctctcccgggtcctggcccacatggaggccaccggggtacggcgggacgtggcctaccttcaggccctttccctggagcttgcggaggagatccgccgcctcgaggaggaggtcttccgcttggcgggccaccccttcaacctcaactcccgggaccagctggaaagggtgctctttgacgagcttaggcttcccgccttggggaagacgcaaaagacaggcaagcgctccaccagcgccgcggtgctggaggccctacgggaggcccaccccatcgtggagaagatcctccagcaccgggagctcaccaagctcaagaacacctacgtggaccccctcccaagcctcgtccacccgaggacgggccgcctccacacccgcttcaaccagacggccacggccacggggaggcttagtagccgtgaccccaacctgcagaacatccccgtccgcacccccttgggccagaggatccgccgggccttcgtggccgaggcgggttgggcgttggtggccctggactatagccagatagagctccgcgtcctcgcccacctctccggggacgaaaacctgatcagggtcttccaggaggggaaggacatccacacccagaccgcaagctggatgttcggcgtccccccggaggccgtggaccccctgatgcgccgggcggccaagacggtgaacttcggcgtcctctacggcatgtccgcccataggctctcccaggagcttgccatcccctacgaggaggcggtggcctttatagagcgctacttccaaagcttccccaaggtgcgggcctggatagaaaagaccctggaggaggggaggaagcggggctacgtggaaaccctcttcggaagaaggcgctacgtgcccgacctcaacgcccgggtgaagagcgtcagggaggccgcggagcgcatggccttcaacatgcccgtccagggcaccgccgccgacctcatgaagctcgccatggtgaagctcttcccccgcctccgggagatgggggcccgcatgctcctccaggtccacgacgagctcctcctggaggccccccaagcgcgggccgaggaggtggcggctttggccaaggaggccatggagaaggcctatcccctcgccgtgcccctggaggtggaggtggggatgggggaggactggctttccgccaagggttaggggggccctgccgtttagaggaagttcaaggggttgtccctcagaaacgcctccaggggaacgccctctgggcctaccaggaggcctttagccccaaaggtgcgggtgaaggcttccaggccctggg

SEQ ID NO: 3528 - DNA, 3221 bp, Artificial Sequence
  Description of Artificial Sequence: Synthetic DNA sequence of Thermus thermophilus DNA Polymerase S579N
tctagaggaagcatgagcctcaccctggcagacaaggtggtctacgaggaggagatccagaaaagccgcttcatcgccaaggcggcccccgtggcctcggaggaggaggccttggcgtttttggccgagaaccgggagcctgaggccacccacaacggccacgcctacaagatcggcctcctctaccgcttctctgacgacggggagccctcgggcaccgcaggcaggcccatcctccacgccatagaggcccagggcctggaccgggtggcggtcctggtggtgcgctacttcggcggggtgaagctcggggccggggggcttgtgcgggcctacgggggggtggcggcggaggccttaaggcgggcgcccaaggtccccttggtggagcgggtggggctcgccttcctcgtgcccttcgccgaggtgggccgggtctacgccctcctggaggcccgcgcccctgaaggccgaggagacctacaccccggaggcgtgcgcttcgccctcctcctccccaagcccgagcgggaaggtttcctcagggcgctcctggacgccacccggggacaggtggccctggagtagcatggaggcgatgcttccgctctttgaacccaaaggccgggtcctcctggtggacggccaccacctggcctaccgcaccttcttcgccctgaagggcctcaccacgagccggggcgaaccggtgcaggcggtctacggcttcgccaagagcctcctcaaggccctgaaggaggacgggtacaaggccgtcttcgtggtctttgacgccaaggccccctccttccgccacgaggcctacgaggcctacaaggcggggagggccccgacccccgaggacttcccccggcagctcgccctcatcaaggagctggtggacctcctggggtttacccgcctcgaggtccccggctacgaggcggacgacgttctcgccaccctggccaagaaggcggaaaaggaggggtacgaggtgcgcatcctcaccgccgaccgcgacctctaccaactcgtctccgaccgcgtcgccgtcctccaccccgagggccacctcatcaccccggagtggctttgggagaagtacggcctcaggccggagcagtgggtggacttccgcgccctcgtgggggacccctccgacaacctccccggggtcaagggcatcggggagaagaccgccctcaagctcctcaaggagtggggaagcctggaaaacctcctcaagaacctggaccgggtaaagccagaaaacgtccgggagaagatcaaggcccacctggaagacctcaggctctccttggagctctcccgggtgcgcaccgacctccccctggaggtggacctcgcccaggggcgggagcccgaccgggaggggcttagggccttcctggagaggctggagttcggcagcctcctccacgagttcggcctcctggaggcccccgcccccctggaggaggccccctggcccccgccggaaggggccttcgtgggcttcgtcctctcccgccccgagcccatgtgggcggagcttaaagccctggccgcctgcagggacggccgggtgcaccgggcagcagaccccttggcggggctaaaggacctcaaggaggtccggggcctcctcgccaaggacctcgccgtcttggcctcgagggaggggctagacctcgtgcccggggacgaccccatgctcctcgcctacctcctggacccctccaacaccacccccgagggggtggcgcggcgctacgggggggagtggacggaggacgccgcccaccgggccctcctctcggagaggctccatcggaacctccttaagcgcctcgagggggaggagaagctcctttggctctaccacgaggtggaaaagcccctctcccgggtcctggcccacatggaggccaccggggtacggcgggacgtggcctaccttcaggccctttccctggagcttgcggaggagatccgccgcctcgaggaggaggtcttccgcttggcgggccaccccttcaacctcaactcccgggaccagctggaaagggtgctctttgacgagcttaggcttcccgccttggggaagacgcaaaagacaggcaagcgctccaccagcgccgcggtgctggaggccctacgggaggcccaccccatcgtggagaagatcctccagcaccgggagctcaccaagctcaagaacacctacgtggaccccctcccaagcctcgtccacccgaggacgggccgcctccacacccgcttcaaccagacggccacggccacggggaggcttagtagcaatgaccccaacctgcagaacatccccgtccgcacccccttgggccagaggatccgccgggccttcgtggccgaggcgggttgggcgttggtggccctggactatagccagatagagctccgcgtcctcgcccacctctccggggacgaaaacctgatcagggtcttccaggaggggaaggacatccacacccagaccgcaagctggatgttcggcgtccccccggaggccgtggaccccctgatgcgccgggcggccaagacggtgaacttcggcgtcctctacggcatgtccgcccataggctctcccaggagcttgccatcccctacgaggaggcggtggcctttatagagcgctacttccaaagcttccccaaggtgcgggcctggatagaaaagaccctggaggaggggaggaagcggggctacgtggaaaccctcttcggaagaaggcgctacgtgcccgacctcaacgcccgggtgaagagcgtcagggaggccgcggagcgcatggccttcaacatgcccgtccagggcaccgccgccgacctcatgaagctcgccatggtgaagctcttcccccgcctccgggagatgggggcccgcatgctcctccaggtccacgacgagctcctcctggaggccccccaagcgcgggccgaggaggtggcggctttggccaaggaggccatggagaaggcctatcccctcgccgtgcccctggaggtggaggtggggatgggggaggactggctttccgccaagggttaggggggccctgccgtttagaggaagttcaaggggttgtccctcagaaacgcctccaggggaacgccctctgggcctaccaggaggcctttagccccaaaggtgcgggtgaaggcttccaggccctggg

SEQ ID NO: 3529 - DNA, 3221 bp, Artificial Sequence
  Description of Artificial Sequence: Synthetic DNA sequence of Thermus thermophilus DNA Polymerase S579D
tctagaggaagcatgagcctcaccctggcagacaaggtggtctacgaggaggagatccagaaaagccgcttcatcgccaaggcggcccccgtggcctcggaggaggaggccttggcgtttttggccgagaaccgggagcctgaggccacccacaacggccacgcctacaagatcggcctcctctaccgcttctctgacgacggggagccctcgggcaccgcaggcaggcccatcctccacgccatagaggcccagggcctggaccgggtggcggtcctggtggtgcgctacttcggcggggtgaagctcggggccggggggcttgtgcgggcctacgggggggtggcggcggaggccttaaggcgggcgcccaaggtccccttggtggagcgggtggggctcgccttcctcgtgcccttcgccgaggtgggccgggtctacgccctcctggaggcccgcgcccctgaaggccgaggagacctacaccccggaggcgtgcgcttcgccctcctcctccccaagcccgagcgggaaggtttcctcagggcgctcctggacgccacccggggacaggtggccctggagtagcatggaggcgatgcttccgctctttgaacccaaaggccgggtcctcctggtggacggccaccacctggcctaccgcaccttcttcgccctgaagggcctcaccacgagccggggcgaaccggtgcaggcggtctacggcttcgccaagagcctcctcaaggccctgaaggaggacgggtacaaggccgtcttcgtggtctttgacgccaaggccccctccttccgccacgaggcctacgaggcctacaaggcggggagggccccgacccccgaggacttcccccggcagctcgccctcatcaaggagctggtggacctcctggggtttacccgcctcgaggtccccggctacgaggcggacgacgttctcgccaccctggccaagaaggcggaaaaggaggggtacgaggtgcgcatcctcaccgccgaccgcgacctctaccaactcgtctccgaccgcgtcgccgtcctccaccccgagggccacctcatcaccccggagtggctttgggagaagtacggcctcaggccggagcagtgggtggacttccgcgccctcgtgggggacccctccgacaacctccccggggtcaagggcatcggggagaagaccgccctcaagctcctcaaggagtggggaagcctggaaaacctcctcaagaacctggaccgggtaaagccagaaaacgtccgggagaagatcaaggcccacctggaagacctcaggctctccttggagctctcccgggtgcgcaccgacctccccctggaggtggacctcgcccaggggcgggagcccgaccgggaggggcttagggccttcctggagaggctggagttcggcagcctcctccacgagttcggcctcctggaggcccccgcccccctggaggaggccccctggcccccgccggaaggggccttcgtgggcttcgtcctctcccgccccgagcccatgtgggcggagcttaaagccctggccgcctgcagggacggccgggtgcaccgggcagcagaccccttggcggggctaaaggacctcaaggaggtccggggcctcctcgccaaggacctcgccgtcttggcctcgagggaggggctagacctcgtgcccggggacgaccccatgctcctcgcctacctcctggacccctccaacaccacccccgagggggtggcgcggcgctacgggggggagtggacggaggacgccgcccaccgggccctcctctcggagaggctccatcggaacctccttaagcgcctcgagggggaggagaagctcctttggctctaccacgaggtggaaaagcccctctcccgggtcctggcccacatggaggccaccggggtacggcgggacgtggcctaccttcaggccctttccctggagcttgcggaggagatccgccgcctcgaggaggaggtcttccgcttggcgggccaccccttcaacctcaactcccgggaccagctggaaagggtgctctttgacgagcttaggcttcccgccttggggaagacgcaaaagacaggcaagcgctccaccagcgccgcggtgctggaggccctacgggaggcccaccccatcgtggagaagatcctccagcaccgggagctcaccaagctcaagaacacctacgtggaccccctcccaagcctcgtccacccgaggacgggccgcctccacacccgcttcaaccagacggccacggccacggggaggcttagtagcgatgaccccaacctgcagaacatccccgtccgcacccccttgggccagaggatccgccgggccttcgtggccgaggcgggttgggcgttggtggccctggactatagccagatagagctccgcgtcctcgcccacctctccggggacgaaaacctgatcagggtcttccaggaggggaaggacatccacacccagaccgcaagctggatgttcggcgtccccccggaggccgtggaccccctgatgcgccgggcggccaagacggtgaacttcggcgtcctctacggcatgtccgcccataggctctcccaggagcttgccatcccctacgaggaggcggtggcctttatagagcgctacttccaaagcttccccaaggtgcgggcctggatagaaaagaccctggaggaggggaggaagcggggctacgtggaaaccctcttcggaagaaggcgctacgtgcccgacctcaacgcccgggtgaagagcgtcagggaggccgcggagcgcatggccttcaacatgcccgtccagggcaccgccgccgacctcatgaagctcgccatggtgaagctcttcccccgcctccgggagatgggggcccgcatgctcctccaggtccacgacgagctcctcctggaggccccccaagcgcgggccgaggaggtggcggctttggccaaggaggccatggagaaggcctatcccctcgccgtgcccctggaggtggaggtggggatgggggaggactggctttccgccaagggttaggggggccctgccgtttagaggaagttcaaggggttgtccctcagaaacgcctccaggggaacgccctctgggcctaccaggaggcctttagccccaaaggtgcgggtgaaggcttccaggccctggg

SEQ ID NO: 3530 - DNA, 3221 bp, Artificial Sequence
  Description of Artificial Sequence: Synthetic DNA sequence of Thermus thermophilus DNA Polymerase S579C
tctagaggaagcatgagcctcaccctggcagacaaggtggtctacgaggaggagatccagaaaagccgcttcatcgccaaggcggcccccgtggcctcggaggaggaggccttggcgtttttggccgagaaccgggagcctgaggccacccacaacggccacgcctacaagatcggcctcctctaccgcttctctgacgacggggagccctcgggcaccgcaggcaggcccatcctccacgccatagaggcccagggcctggaccgggtggcggtcctggtggtgcgctacttcggcggggtgaagctcggggccggggggcttgtgcgggcctacgggggggtggcggcggaggccttaaggcgggcgcccaaggtccccttggtggagcgggtggggctcgccttcctcgtgcccttcgccgaggtgggccgggtctacgccctcctggaggcccgcgcccctgaaggccgaggagacctacaccccggaggcgtgcgcttcgccctcctcctccccaagcccgagcgggaaggtttcctcagggcgctcctggacgccacccggggacaggtggccctggagtagcatggaggcgatgcttccgctctttgaacccaaaggccgggtcctcctggtggacggccaccacctggcctaccgcaccttcttcgccctgaagggcctcaccacgagccggggcgaaccggtgcaggcggtctacggcttcgccaagagcctcctcaaggccctgaaggaggacgggtacaaggccgtcttcgtggtctttgacgccaaggccccctccttccgccacgaggcctacgaggcctacaaggcggggagggccccgacccccgaggacttcccccggcagctcgccctcatcaaggagctggtggacctcctggggtttacccgcctcgaggtccccggctacgaggcggacgacgttctcgccaccctggccaagaaggcggaaaaggaggggtacgaggtgcgcatcctcaccgccgaccgcgacctctaccaactcgtctccgaccgcgtcgccgtcctccaccccgagggccacctcatcaccccggagtggctttgggagaagtacggcctcaggccggagcagtgggtggacttccgcgccctcgtgggggacccctccgacaacctccccggggtcaagggcatcggggagaagaccgccctcaagctcctcaaggagtggggaagcctggaaaacctcctcaagaacctggaccgggtaaagccagaaaacgtccgggagaagatcaaggcccacctggaagacctcaggctctccttggagctctcccgggtgcgcaccgacctccccctggaggtggacctcgcccaggggcgggagcccgaccgggaggggcttagggccttcctggagaggctggagttcggcagcctcctccacgagttcggcctcctggaggcccccgcccccctggaggaggccccctggcccccgccggaaggggccttcgtgggcttcgtcctctcccgccccgagcccatgtgggcggagcttaaagccctggccgcctgcagggacggccgggtgcaccgggcagcagaccccttggcggggctaaaggacctcaaggaggtccggggcctcctcgccaaggacctcgccgtcttggcctcgagggaggggctagacctcgtgcccggggacgaccccatgctcctcgcctacctcctggacccctccaacaccacccccgagggggtggcgcggcgctacgggggggagtggacggaggacgccgcccaccgggccctcctctcggagaggctccatcggaacctccttaagcgcctcgagggggaggagaagctcctttggctctaccacgaggtggaaaagcccctctcccgggtcctggcccacatggaggccaccggggtacggcgggacgtggcctaccttcaggccctttccctggagcttgcggaggagatccgccgcctcgaggaggaggtcttccgcttggcgggccaccccttcaacctcaactcccgggaccagctggaaagggtgctctttgacgagcttaggcttcccgccttggggaagacgcaaaagacaggcaagcgctccaccagcgccgcggtgctggaggccctacgggaggcccaccccatcgtggagaagatcctccagcaccgggagctcaccaagctcaagaacacctacgtggaccccctcccaagcctcgtccacccgaggacgggccgcctccacacccgcttcaaccagacggccacggccacggggaggcttagtagctgtgaccccaacctgcagaacatccccgtccgcacccccttgggccagaggatccgccgggccttcgtggccgaggcgggttgggcgttggtggccctggactatagccagatagagctccgcgtcctcgcccacctctccggggacgaaaacctgatcagggtcttccaggaggggaaggacatccacacccagaccgcaagctggatgttcggcgtccccccggaggccgtggaccccctgatgcgccgggcggccaagacggtgaacttcggcgtcctctacggcatgtccgcccataggctctcccaggagcttgccatcccctacgaggaggcggtggcctttatagagcgctacttccaaagcttccccaaggtgcgggcctggatagaaaagaccctggaggaggggaggaagcggggctacgtggaaaccctcttcggaagaaggcgctacgtgcccgacctcaacgcccgggtgaagagcgtcagggaggccgcggagcgcatggccttcaacatgcccgtccagggcaccgccgccgacctcatgaagctcgccatggtgaagctcttcccccgcctccgggagatgggggcccgcatgctcctccaggtccacgacgagctcctcctggaggccccccaagcgcgggccgaggaggtggcggctttggccaaggaggccatggagaaggcctatcccctcgccgtgcccctggaggtggaggtggggatgggggaggactggctttccgccaagggttaggggggccctgccgtttagaggaagttcaaggggttgtccctcagaaacgcctccaggggaacgccctctgggcctaccaggaggcctttagccccaaaggtgcgggtgaaggcttccaggccctggg

SEQ ID NO: 3531 - DNA, 3221 bp, Artificial Sequence
  Description of Artificial Sequence: Synthetic DNA sequence of Thermus thermophilus DNA Polymerase S579E
tctagaggaagcatgagcctcaccctggcagacaaggtggtctacgaggaggagatccagaaaagccgcttcatcgccaaggcggcccccgtggcctcggaggaggaggccttggcgtttttggccgagaaccgggagcctgaggccacccacaacggccacgcctacaagatcggcctcctctaccgcttctctgacgacggggagccctcgggcaccgcaggcaggcccatcctccacgccatagaggcccagggcctggaccgggtggcggtcctggtggtgcgctacttcggcggggtgaagctcggggccggggggcttgtgcgggcctacgggggggtggcggcggaggccttaaggcgggcgcccaaggtccccttggtggagcgggtggggctcgccttcctcgtgcccttcgccgaggtgggccgggtctacgccctcctggaggcccgcgcccctgaaggccgaggagacctacaccccggaggcgtgcgcttcgccctcctcctccccaagcccgagcgggaaggtttcctcagggcgctcctggacgccacccggggacaggtggccctggagtagcatggaggcgatgcttccgctctttgaacccaaaggccgggtcctcctggtggacggccaccacctggcctaccgcaccttcttcgccctgaagggcctcaccacgagccggggcgaaccggtgcaggcggtctacggcttcgccaagagcctcctcaaggccctgaaggaggacgggtacaaggccgtcttcgtggtctttgacgccaaggccccctccttccgccacgaggcctacgaggcctacaaggcggggagggccccgacccccgaggacttcccccggcagctcgccctcatcaaggagctggtggacctcctggggtttacccgcctcgaggtccccggctacgaggcggacgacgttctcgccaccctggccaagaaggcggaaaaggaggggtacgaggtgcgcatcctcaccgccgaccgcgacctctaccaactcgtctccgaccgcgtcgccgtcctccaccccgagggccacctcatcaccccggagtggctttgggagaagtacggcctcaggccggagcagtgggtggacttccgcgccctcgtgggggacccctccgacaacctccccggggtcaagggcatcggggagaagaccgccctcaagctcctcaaggagtggggaagcctggaaaacctcctcaagaacctggaccgggtaaagccagaaaacgtccgggagaagatcaaggcccacctggaagacctcaggctctccttggagctctcccgggtgcgcaccgacctccccctggaggtggacctcgcccaggggcgggagcccgaccgggaggggcttagggccttcctggagaggctggagttcggcagcctcctccacgagttcggcctcctggaggcccccgcccccctggaggaggccccctggcccccgccggaaggggccttcgtgggcttcgtcctctcccgccccgagcccatgtgggcggagcttaaagccctggccgcctgcagggacggccgggtgcaccgggcagcagaccccttggcggggctaaaggacctcaaggaggtccggggcctcctcgccaaggacctcgccgtcttggcctcgagggaggggctagacctcgtgcccggggacgaccccatgctcctcgcctacctcctggacccctccaacaccacccccgagggggtggcgcggcgctacgggggggagtggacggaggacgccgcccaccgggccctcctctcggagaggctccatcggaacctccttaagcgcctcgagggggaggagaagctcctttggctctaccacgaggtggaaaagcccctctcccgggtcctggcccacatggaggccaccggggtacggcgggacgtggcctaccttcaggccctttccctggagcttgcggaggagatccgccgcctcgaggaggaggtcttccgcttggcgggccaccccttcaacctcaactcccgggaccagctggaaagggtgctctttgacgagcttaggcttcccgccttggggaagacgcaaaagacaggcaagcgctccaccagcgccgcggtgctggaggccctacgggaggcccaccccatcgtggagaagatcctccagcaccgggagctcaccaagctcaagaacacctacgtggaccccctcccaagcctcgtccacccgaggacgggccgcctccacacccgcttcaaccagacggccacggccacggggaggcttagtagcgaagaccccaacctgcagaacatccccgtccgcacccccttgggccagaggatccgccgggccttcgtggccgaggcgggttgggcgttggtggccctggactatagccagatagagctccgcgtcctcgcccacctctccggggacgaaaacctgatcagggtcttccaggaggggaaggacatccacacccagaccgcaagctggatgttcggcgtccccccggaggccgtggaccccctgatgcgccgggcggccaagacggtgaacttcggcgtcctctacggcatgtccgcccataggctctcccaggagcttgccatcccctacgaggaggcggtggcctttatagagcgctacttccaaagcttccccaaggtgcgggcctggatagaaaagaccctggaggaggggaggaagcggggctacgtggaaaccctcttcggaagaaggcgctacgtgcccgacctcaacgcccgggtgaagagcgtcagggaggccgcggagcgcatggccttcaacatgcccgtccagggcaccgccgccgacctcatgaagctcgccatggtgaagctcttcccccgcctccgggagatgggggcccgcatgctcctccaggtccacgacgagctcctcctggaggccccccaagcgcgggccgaggaggtggcggctttggccaaggaggccatggagaaggcctatcccctcgccgtgcccctggaggtggaggtggggatgggggaggactggctttccgccaagggttaggggggccctgccgtttagaggaagttcaaggggttgtccctcagaaacgcctccaggggaacgccctctgggcctaccaggaggcctttagccccaaaggtgcgggtgaaggcttccaggccctggg

SEQ ID NO: 3532 - DNA, 3221 bp, Artificial Sequence
  Description of Artificial Sequence: Synthetic DNA sequence of Thermus thermophilus DNA Polymerase S579Q
tctagaggaagcatgagcctcaccctggcagacaaggtggtctacgaggaggagatccagaaaagccgcttcatcgccaaggcggcccccgtggcctcggaggaggaggccttggcgtttttggccgagaaccgggagcctgaggccacccacaacggccacgcctacaagatcggcctcctctaccgcttctctgacgacggggagccctcgggcaccgcaggcaggcccatcctccacgccatagaggcccagggcctggaccgggtggcggtcctggtggtgcgctacttcggcggggtgaagctcggggccggggggcttgtgcgggcctacgggggggtggcggcggaggccttaaggcgggcgcccaaggtccccttggtggagcgggtggggctcgccttcctcgtgcccttcgccgaggtgggccgggtctacgccctcctggaggcccgcgcccctgaaggccgaggagacctacaccccggaggcgtgcgcttcgccctcctcctccccaagcccgagcgggaaggtttcctcagggcgctcctggacgccacccggggacaggtggccctggagtagcatggaggcgatgcttccgctctttgaacccaaaggccgggtcctcctggtggacggccaccacctggcctaccgcaccttcttcgccctgaagggcctcaccacgagccggggcgaaccggtgcaggcggtctacggcttcgccaagagcctcctcaaggccctgaaggaggacgggtacaaggccgtcttcgtggtctttgacgccaaggccccctccttccgccacgaggcctacgaggcctacaaggcggggagggccccgacccccgaggacttcccccggcagctcgccctcatcaaggagctggtggacctcctggggtttacccgcctcgaggtccccggctacgaggcggacgacgttctcgccaccctggccaagaaggcggaaaaggaggggtacgaggtgcgcatcctcaccgccgaccgcgacctctaccaactcgtctccgaccgcgtcgccgtcctccaccccgagggccacctcatcaccccggagtggctttgggagaagtacggcctcaggccggagcagtgggtggacttccgcgccctcgtgggggacccctccgacaacctccccggggtcaagggcatcggggagaagaccgccctcaagctcctcaaggagtggggaagcctggaaaacctcctcaagaacctggaccgggtaaagccagaaaacgtccgggagaagatcaaggcccacctggaagacctcaggctctccttggagctctcccgggtgcgcaccgacctccccctggaggtggacctcgcccaggggcgggagcccgaccgggaggggcttagggccttcctggagaggctggagttcggcagcctcctccacgagttcggcctcctggaggcccccgcccccctggaggaggccccctggcccccgccggaaggggccttcgtgggcttcgtcctctcccgccccgagcccatgtgggcggagcttaaagccctggccgcctgcagggacggccgggtgcaccgggcagcagaccccttggcggggctaaaggacctcaaggaggtccggggcctcctcgccaaggacctcgccgtcttggcctcgagggaggggctagacctcgtgcccggggacgaccccatgctcctcgcctacctcctggacccctccaacaccacccccgagggggtggcgcggcgctacgggggggagtggacggaggacgccgcccaccgggccctcctctcggagaggctccatcggaacctccttaagcgcctcgagggggaggagaagctcctttggctctaccacgaggtggaaaagcccctctcccgggtcctggcccacatggaggccaccggggtacggcgggacgtggcctaccttcaggccctttccctggagcttgcggaggagatccgccgcctcgaggaggaggtcttccgcttggcgggccaccccttcaacctcaactcccgggaccagctggaaagggtgctctttgacgagcttaggcttcccgccttggggaagacgcaaaagacaggcaagcgctccaccagcgccgcggtgctggaggccctacgggaggcccaccccatcgtggagaagatcctccagcaccgggagctcaccaagctcaagaacacctacgtggaccccctcccaagcctcgtccacccgaggacgggccgcctccacacccgcttcaaccagacggccacggccacggggaggcttagtagccaagaccccaacctgcagaacatccccgtccgcacccccttgggccagaggatccgccgggccttcgtggccgaggcgggttgggcgttggtggccctggactatagccagatagagctccgcgtcctcgcccacctctccggggacgaaaacctgatcagggtcttccaggaggggaaggacatccacacccagaccgcaagctggatgttcggcgtccccccggaggccgtggaccccctgatgcgccgggcggccaagacggtgaacttcggcgtcctctacggcatgtccgcccataggctctcccaggagcttgccatcccctacgaggaggcggtggcctttatagagcgctacttccaaagcttccccaaggtgcgggcctggatagaaaagaccctggaggaggggaggaagcggggctacgtggaaaccctcttcggaagaaggcgctacgtgcccgacctcaacgcccgggtgaagagcgtcagggaggccgcggagcgcatggccttcaacatgcccgtccagggcaccgccgccgacctcatgaagctcgccatggtgaagctcttcccccgcctccgggagatgggggcccgcatgctcctccaggtccacgacgagctcctcctggaggccccccaagcgcgggccgaggaggtggcggctttggccaaggaggccatggagaaggcctatcccctcgccgtgcccctggaggtggaggtggggatgggggaggactggctttccgccaagggttaggggggccctgccgtttagaggaagttcaaggggttgtccctcagaaacgcctccaggggaacgccctctgggcctaccaggaggcctttagccccaaaggtgcgggtgaaggcttccaggccctggg

SEQ ID NO: 3533 - DNA, 3221 bp, Artificial Sequence
  Description of Artificial Sequence: Synthetic DNA sequence of Thermus thermophilus DNA Polymerase S579G
tctagaggaagcatgagcctcaccctggcagacaaggtggtctacgaggaggagatccagaaaagccgcttcatcgccaaggcggcccccgtggcctcggaggaggaggccttggcgtttttggccgagaaccgggagcctgaggccacccacaacggccacgcctacaagatcggcctcctctaccgcttctctgacgacggggagccctcgggcaccgcaggcaggcccatcctccacgccatagaggcccagggcctggaccgggtggcggtcctggtggtgcgctacttcggcggggtgaagctcggggccggggggcttgtgcgggcctacgggggggtggcggcggaggccttaaggcgggcgcccaaggtccccttggtggagcgggtggggctcgccttcctcgtgcccttcgccgaggtgggccgggtctacgccctcctggaggcccgcgcccctgaaggccgaggagacctacaccccggaggcgtgcgcttcgccctcctcctccccaagcccgagcgggaaggtttcctcagggcgctcctggacgccacccggggacaggtggccctggagtagcatggaggcgatgcttccgctctttgaacccaaaggccgggtcctcctggtggacggccaccacctggcctaccgcaccttcttcgccctgaagggcctcaccacgagccggggcgaaccggtgcaggcggtctacggcttcgccaagagcctcctcaaggccctgaaggaggacgggtacaaggccgtcttcgtggtctttgacgccaaggccccctccttccgccacgaggcctacgaggcctacaaggcggggagggccccgacccccgaggacttcccccggcagctcgccctcatcaaggagctggtggacctcctggggtttacccgcctcgaggtccccggctacgaggcggacgacgttctcgccaccctggccaagaaggcggaaaaggaggggtacgaggtgcgcatcctcaccgccgaccgcgacctctaccaactcgtctccgaccgcgtcgccgtcctccaccccgagggccacctcatcaccccggagtggctttgggagaagtacggcctcaggccggagcagtgggtggacttccgcgccctcgtgggggacccctccgacaacctccccggggtcaagggcatcggggagaagaccgccctcaagctcctcaaggagtggggaagcctggaaaacctcctcaagaacctggaccgggtaaagccagaaaacgtccgggagaagatcaaggcccacctggaagacctcaggctctccttggagctctcccgggtgcgcaccgacctccccctggaggtggacctcgcccaggggcgggagcccgaccgggaggggcttagggccttcctggagaggctggagttcggcagcctcctccacgagttcggcctcctggaggcccccgcccccctggaggaggccccctggcccccgccggaaggggccttcgtgggcttcgtcctctcccgccccgagcccatgtgggcggagcttaaagccctggccgcctgcagggacggccgggtgcaccgggcagcagaccccttggcggggctaaaggacctcaaggaggtccggggcctcctcgccaaggacctcgccgtcttggcctcgagggaggggctagacctcgtgcccggggacgaccccatgctcctcgcctacctcctggacccctccaacaccacccccgagggggtggcgcggcgctacgggggggagtggacggaggacgccgcccaccgggccctcctctcggagaggctccatcggaacctccttaagcgcctcgagggggaggagaagctcctttggctctaccacgaggtggaaaagcccctctcccgggtcctggcccacatggaggccaccggggtacggcgggacgtggcctaccttcaggccctttccctggagcttgcggaggagatccgccgcctcgaggaggaggtcttccgcttggcgggccaccccttcaacctcaactcccgggaccagctggaaagggtgctctttgacgagcttaggcttcccgccttggggaagacgcaaaagacaggcaagcgctccaccagcgccgcggtgctggaggccctacgggaggcccaccccatcgtggagaagatcctccagcaccgggagctcaccaagctcaagaacacctacgtggaccccctcccaagcctcgtccacccgaggacgggccgcctccacacccgcttcaaccagacggccacggccacggggaggcttagtagcggtgaccccaacctgcagaacatccccgtccgcacccccttgggccagaggatccgccgggccttcgtggccgaggcgggttgggcgttggtggccctggactatagccagatagagctccgcgtcctcgcccacctctccggggacgaaaacctgatcagggtcttccaggaggggaaggacatccacacccagaccgcaagctggatgttcggcgtccccccggaggccgtggaccccctgatgcgccgggcggccaagacggtgaacttcggcgtcctctacggcatgtccgcccataggctctcccaggagcttgccatcccctacgaggaggcggtggcctttatagagcgctacttccaaagcttccccaaggtgcgggcctggatagaaaagaccctggaggaggggaggaagcggggctacgtggaaaccctcttcggaagaaggcgctacgtgcccgacctcaacgcccgggtgaagagcgtcagggaggccgcggagcgcatggccttcaacatgcccgtccagggcaccgccgccgacctcatgaagctcgccatggtgaagctcttcccccgcctccgggagatgggggcccgcatgctcctccaggtccacgacgagctcctcctggaggccccccaagcgcgggccgaggaggtggcggctttggccaaggaggccatggagaaggcctatcccctcgccgtgcccctggaggtggaggtggggatgggggaggactggctttccgccaagggttaggggggccctgccgtttagaggaagttcaaggggttgtccctcagaaacgcctccaggggaacgccctctgggcctaccaggaggcctttagccccaaaggtgcgggtgaaggcttccaggccctggg

SEQ ID NO: 3534 - DNA, 3221 bp, Artificial Sequence
  Description of Artificial Sequence: Synthetic DNA sequence of Thermus thermophilus DNA Polymerase S579H
tctagaggaagcatgagcctcaccctggcagacaaggtggtctacgaggaggagatccagaaaagccgcttcatcgccaaggcggcccccgtggcctcggaggaggaggccttggcgtttttggccgagaaccgggagcctgaggccacccacaacggccacgcctacaagatcggcctcctctaccgcttctctgacgacggggagccctcgggcaccgcaggcaggcccatcctccacgccatagaggcccagggcctggaccgggtggcggtcctggtggtgcgctacttcggcggggtgaagctcggggccggggggcttgtgcgggcctacgggggggtggcggcggaggccttaaggcgggcgcccaaggtccccttggtggagcgggtggggctcgccttcctcgtgcccttcgccgaggtgggccgggtctacgccctcctggaggcccgcgcccctgaaggccgaggagacctacaccccggaggcgtgcgcttcgccctcctcctccccaagcccgagcgggaaggtttcctcagggcgctcctggacgccacccggggacaggtggccctggagtagcatggaggcgatgcttccgctctttgaacccaaaggccgggtcctcctggtggacggccaccacctggcctaccgcaccttcttcgccctgaagggcctcaccacgagccggggcgaaccggtgcaggcggtctacggcttcgccaagagcctcctcaaggccctgaaggaggacgggtacaaggccgtcttcgtggtctttgacgccaaggccccctccttccgccacgaggcctacgaggcctacaaggcggggagggccccgacccccgaggacttcccccggcagctcgccctcatcaaggagctggtggacctcctggggtttacccgcctcgaggtccccggctacgaggcggacgacgttctcgccaccctggccaagaaggcggaaaaggaggggtacgaggtgcgcatcctcaccgccgaccgcgacctctaccaactcgtctccgaccgcgtcgccgtcctccaccccgagggccacctcatcaccccggagtggctttgggagaagtacggcctcaggccggagcagtgggtggacttccgcgccctcgtgggggacccctccgacaacctccccggggtcaagggcatcggggagaagaccgccctcaagctcctcaaggagtggggaagcctggaaaacctcctcaagaacctggaccgggtaaagccagaaaacgtccgggagaagatcaaggcccacctggaagacctcaggctctccttggagctctcccgggtgcgcaccgacctccccctggaggtggacctcgcccaggggcgggagcccgaccgggaggggcttagggccttcctggagaggctggagttcggcagcctcctccacgagttcggcctcctggaggcccccgcccccctggaggaggccccctggcccccgccggaaggggccttcgtgggcttcgtcctctcccgccccgagcccatgtgggcggagcttaaagccctggccgcctgcagggacggccgggtgcaccgggcagcagaccccttggcggggctaaaggacctcaaggaggtccggggcctcctcgccaaggacctcgccgtcttggcctcgagggaggggctagacctcgtgcccggggacgaccccatgctcctcgcctacctcctggacccctccaacaccacccccgagggggtggcgcggcgctacgggggggagtggacggaggacgccgcccaccgggccctcctctcggagaggctccatcggaacctccttaagcgcctcgagggggaggagaagctcctttggctctaccacgaggtggaaaagcccctctcccgggtcctggcccacatggaggccaccggggtacggcgggacgtggcctaccttcaggccctttccctggagcttgcggaggagatccgccgcctcgaggaggaggtcttccgcttggcgggccaccccttcaacctcaactcccgggaccagctggaaagggtgctctttgacgagcttaggcttcccgccttggggaagacgcaaaagacaggcaagcgctccaccagcgccgcggtgctggaggccctacgggaggcccaccccatcgtggagaagatcctccagcaccgggagctcaccaagctcaagaacacctacgtggaccccctcccaagcctcgtccacccgaggacgggccgcctccacacccgcttcaaccagacggccacggccacggggaggcttagtagccatgaccccaacctgcagaacatccccgtccgcacccccttgggccagaggatccgccgggccttcgtggccgaggcgggttgggcgttggtggccctggactatagccagatagagctccgcgtcctcgcccacctctccggggacgaaaacctgatcagggtcttccaggaggggaaggacatccacacccagaccgcaagctggatgttcggcgtccccccggaggccgtggaccccctgatgcgccgggcggccaagacggtgaacttcggcgtcctctacggcatgtccgcccataggctctcccaggagcttgccatcccctacgaggaggcggtggcctttatagagcgctacttccaaagcttccccaaggtgcgggcctggatagaaaagaccctggaggaggggaggaagcggggctacgtggaaaccctcttcggaagaaggcgctacgtgcccgacctcaacgcccgggtgaagagcgtcagggaggccgcggagcgcatggccttcaacatgcccgtccagggcaccgccgccgacctcatgaagctcgccatggtgaagctcttcccccgcctccgggagatgggggcccgcatgctcctccaggtccacgacgagctcctcctggaggccccccaagcgcgggccgaggaggtggcggctttggccaaggaggccatggagaaggcctatcccctcgccgtgcccctggaggtggaggtggggatgggggaggactggctttccgccaagggttaggggggccctgccgtttagaggaagttcaaggggttgtccctcagaaacgcctccaggggaacgccctctgggcctaccaggaggcctttagccccaaaggtgcgggtgaaggcttccaggccctggg

SEQ ID NO: 3535 - DNA, 3221 bp, Artificial Sequence
  Description of Artificial Sequence: Synthetic DNA sequence of Thermus thermophilus DNA Polymerase S579I
tctagaggaagcatgagcctcaccctggcagacaaggtggtctacgaggaggagatccagaaaagccgcttcatcgccaaggcggcccccgtggcctcggaggaggaggccttggcgtttttggccgagaaccgggagcctgaggccacccacaacggccacgcctacaagatcggcctcctctaccgcttctctgacgacggggagccctcgggcaccgcaggcaggcccatcctccacgccatagaggcccagggcctggaccgggtggcggtcctggtggtgcgctacttcggcggggtgaagctcggggccggggggcttgtgcgggcctacgggggggtggcggcggaggccttaaggcgggcgcccaaggtccccttggtggagcgggtggggctcgccttcctcgtgcccttcgccgaggtgggccgggtctacgccctcctggaggcccgcgcccctgaaggccgaggagacctacaccccggaggcgtgcgcttcgccctcctcctccccaagcccgagcgggaaggtttcctcagggcgctcctggacgccacccggggacaggtggccctggagtagcatggaggcgatgcttccgctctttgaacccaaaggccgggtcctcctggtggacggccaccacctggcctaccgcaccttcttcgccctgaagggcctcaccacgagccggggcgaaccggtgcaggcggtctacggcttcgccaagagcctcctcaaggccctgaaggaggacgggtacaaggccgtcttcgtggtctttgacgccaaggccccctccttccgccacgaggcctacgaggcctacaaggcggggagggccccgacccccgaggacttcccccggcagctcgccctcatcaaggagctggtggacctcctggggtttacccgcctcgaggtccccggctacgaggcggacgacgttctcgccaccctggccaagaaggcggaaaaggaggggtacgaggtgcgcatcctcaccgccgaccgcgacctctaccaactcgtctccgaccgcgtcgccgtcctccaccccgagggccacctcatcaccccggagtggctttgggagaagtacggcctcaggccggagcagtgggtggacttccgcgccctcgtgggggacccctccgacaacctccccggggtcaagggcatcggggagaagaccgccctcaagctcctcaaggagtggggaagcctggaaaacctcctcaagaacctggaccgggtaaagccagaaaacgtccgggagaagatcaaggcccacctggaagacctcaggctctccttggagctctcccgggtgcgcaccgacctccccctggaggtggacctcgcccaggggcgggagcccgaccgggaggggcttagggccttcctggagaggctggagttcggcagcctcctccacgagttcggcctcctggaggcccccgcccccctggaggaggccccctggcccccgccggaaggggccttcgtgggcttcgtcctctcccgccccgagcccatgtgggcggagcttaaagccctggccgcctgcagggacggccgggtgcaccgggcagcagaccccttggcggggctaaaggacctcaaggaggtccggggcctcctcgccaaggacctcgccgtcttggcctcgagggaggggctagacctcgtgcccggggacgaccccatgctcctcgcctacctcctggacccctccaacaccacccccgagggggtggcgcggcgctacgggggggagtggacggaggacgccgcccaccgggccctcctctcggagaggctccatcggaacctccttaagcgcctcgagggggaggagaagctcctttggctctaccacgaggtggaaaagcccctctcccgggtcctggcccacatggaggccaccggggtacggcgggacgtggcctaccttcaggccctttccctggagcttgcggaggagatccgccgcctcgaggaggaggtcttccgcttggcgggccaccccttcaacctcaactcccgggaccagctggaaagggtgctctttgacgagcttaggcttcccgccttggggaagacgcaaaagacaggcaagcgctccaccagcgccgcggtgctggaggccctacgggaggcccaccccatcgtggagaagatcctccagcaccgggagctcaccaagctcaagaacacctacgtggaccccctcccaagcctcgtccacccgaggacgggccgcctccacacccgcttcaaccagacggccacggccacggggaggcttagtagcattgaccccaacctgcagaacatccccgtccgcacccccttgggccagaggatccgccgggccttcgtggccgaggcgggttgggcgttggtggccctggactatagccagatagagctccgcgtcctcgcccacctctccggggacgaaaacctgatcagggtcttccaggaggggaaggacatccacacccagaccgcaagctggatgttcggcgtccccccggaggccgtggaccccctgatgcgccgggcggccaagacggtgaacttcggcgtcctctacggcatgtccgcccataggctctcccaggagcttgccatcccctacgaggaggcggtggcctttatagagcgctacttccaaagcttccccaaggtgcgggcctggatagaaaagaccctggaggaggggaggaagcggggctacgtggaaaccctcttcggaagaaggcgctacgtgcccgacctcaacgcccgggtgaagagcgtcagggaggccgcggagcgcatggccttcaacatgcccgtccagggcaccgccgccgacctcatgaagctcgccatggtgaagctcttcccccgcctccgggagatgggggcccgcatgctcctccaggtccacgacgagctcctcctggaggccccccaagcgcgggccgaggaggtggcggctttggccaaggaggccatggagaaggcctatcccctcgccgtgcccctggaggtggaggtggggatgggggaggactggctttccgccaagggttaggggggccctgccgtttagaggaagttcaaggggttgtccctcagaaacgcctccaggggaacgccctctgggcctaccaggaggcctttagccccaaaggtgcgggtgaaggcttccaggccctggg

SEQ ID NO: 3536 - DNA, 3221 bp, Artificial Sequence
  Description of Artificial Sequence: Synthetic DNA sequence of Thermus thermophilus DNA Polymerase S579L
tctagaggaagcatgagcctcaccctggcagacaaggtggtctacgaggaggagatccagaaaagccgcttcatcgccaaggcggcccccgtggcctcggaggaggaggccttggcgtttttggccgagaaccgggagcctgaggccacccacaacggccacgcctacaagatcggcctcctctaccgcttctctgacgacggggagccctcgggcaccgcaggcaggcccatcctccacgccatagaggcccagggcctggaccgggtggcggtcctggtggtgcgctacttcggcggggtgaagctcggggccggggggcttgtgcgggcctacgggggggtggcggcggaggccttaaggcgggcgcccaaggtccccttggtggagcgggtggggctcgccttcctcgtgcccttcgccgaggtgggccgggtctacgccctcctggaggcccgcgcccctgaaggccgaggagacctacaccccggaggcgtgcgcttcgccctcctcctccccaagcccgagcgggaaggtttcctcagggcgctcctggacgccacccggggacaggtggccctggagtagcatggaggcgatgcttccgctctttgaacccaaaggccgggtcctcctggtggacggccaccacctggcctaccgcaccttcttcgccctgaagggcctcaccacgagccggggcgaaccggtgcaggcggtctacggcttcgccaagagcctcctcaaggccctgaaggaggacgggtacaaggccgtcttcgtggtctttgacgccaaggccccctccttccgccacgaggcctacgaggcctacaaggcggggagggccccgacccccgaggacttcccccggcagctcgccctcatcaaggagctggtggacctcctggggtttacccgcctcgaggtccccggctacgaggcggacgacgttctcgccaccctggccaagaaggcggaaaaggaggggtacgaggtgcgcatcctcaccgccgaccgcgacctctaccaactcgtctccgaccgcgtcgccgtcctccaccccgagggccacctcatcaccccggagtggctttgggagaagtacggcctcaggccggagcagtgggtggacttccgcgccctcgtgggggacccctccgacaacctccccggggtcaagggcatcggggagaagaccgccctcaagctcctcaaggagtggggaagcctggaaaacctcctcaagaacctggaccgggtaaagccagaaaacgtccgggagaagatcaaggcccacctggaagacctcaggctctccttggagctctcccgggtgcgcaccgacctccccctggaggtggacctcgcccaggggcgggagcccgaccgggaggggcttagggccttcctggagaggctggagttcggcagcctcctccacgagttcggcctcctggaggcccccgcccccctggaggaggccccctggcccccgccggaaggggccttcgtgggcttcgtcctctcccgccccgagcccatgtgggcggagcttaaagccctggccgcctgcagggacggccgggtgcaccgggcagcagaccccttggcggggctaaaggacctcaaggaggtccggggcctcctcgccaaggacctcgccgtcttggcctcgagggaggggctagacctcgtgcccggggacgaccccatgctcctcgcctacctcctggacccctccaacaccacccccgagggggtggcgcggcgctacgggggggagtggacggaggacgccgcccaccgggccctcctctcggagaggctccatcggaacctccttaagcgcctcgagggggaggagaagctcctttggctctaccacgaggtggaaaagcccctctcccgggtcctggcccacatggaggccaccggggtacggcgggacgtggcctaccttcaggccctttccctggagcttgcggaggagatccgccgcctcgaggaggaggtcttccgcttggcgggccaccccttcaacctcaactcccgggaccagctggaaagggtgctctttgacgagcttaggcttcccgccttggggaagacgcaaaagacaggcaagcgctccaccagcgccgcggtgctggaggccctacgggaggcccaccccatcgtggagaagatcctccagcaccgggagctcaccaagctcaagaacacctacgtggaccccctcccaagcctcgtccacccgaggacgggccgcctccacacccgcttcaaccagacggccacggccacggggaggcttagtagccttgaccccaacctgcagaacatccccgtccgcacccccttgggccagaggatccgccgggccttcgtggccgaggcgggttgggcgttggtggccctggactatagccagatagagctccgcgtcctcgcccacctctccggggacgaaaacctgatcagggtcttccaggaggggaaggacatccacacccagaccgcaagctggatgttcggcgtccccccggaggccgtggaccccctgatgcgccgggcggccaagacggtgaacttcggcgtcctctacggcatgtccgcccataggctctcccaggagcttgccatcccctacgaggaggcggtggcctttatagagcgctacttccaaagcttccccaaggtgcgggcctggatagaaaagaccctggaggaggggaggaagcggggctacgtggaaaccctcttcggaagaaggcgctacgtgcccgacctcaacgcccgggtgaagagcgtcagggaggccgcggagcgcatggccttcaacatgcccgtccagggcaccgccgccgacctcatgaagctcgccatggtgaagctcttcccccgcctccgggagatgggggcccgcatgctcctccaggtccacgacgagctcctcctggaggccccccaagcgcgggccgaggaggtggcggctttggccaaggaggccatggagaaggcctatcccctcgccgtgcccctggaggtggaggtggggatgggggaggactggctttccgccaagggttaggggggccctgccgtttagaggaagttcaaggggttgtccctcagaaacgcctccaggggaacgccctctgggcctaccaggaggcctttagccccaaaggtgcgggtgaaggcttccaggccctggg

SEQ ID NO: 3537 - DNA, 3221 bp, Artificial Sequence
  Description of Artificial Sequence: Synthetic DNA sequence of Thermus thermophilus DNA Polymerase S579K
tctagaggaagcatgagcctcaccctggcagacaaggtggtctacgaggaggagatccagaaaagccgcttcatcgccaaggcggcccccgtggcctcggaggaggaggccttggcgtttttggccgagaaccgggagcctgaggccacccacaacggccacgcctacaagatcggcctcctctaccgcttctctgacgacggggagccctcgggcaccgcaggcaggcccatcctccacgccatagaggcccagggcctggaccgggtggcggtcctggtggtgcgctacttcggcggggtgaagctcggggccggggggcttgtgcgggcctacgggggggtggcggcggaggccttaaggcgggcgcccaaggtccccttggtggagcgggtggggctcgccttcctcgtgcccttcgccgaggtgggccgggtctacgccctcctggaggcccgcgcccctgaaggccgaggagacctacaccccggaggcgtgcgcttcgccctcctcctccccaagcccgagcgggaaggtttcctcagggcgctcctggacgccacccggggacaggtggccctggagtagcatggaggcgatgcttccgctctttgaacccaaaggccgggtcctcctggtggacggccaccacctggcctaccgcaccttcttcgccctgaagggcctcaccacgagccggggcgaaccggtgcaggcggtctacggcttcgccaagagcctcctcaaggccctgaaggaggacgggtacaaggccgtcttcgtggtctttgacgccaaggccccctccttccgccacgaggcctacgaggcctacaaggcggggagggccccgacccccgaggacttcccccggcagctcgccctcatcaaggagctggtggacctcctggggtttacccgcctcgaggtccccggctacgaggcggacgacgttctcgccaccctggccaagaaggcggaaaaggaggggtacgaggtgcgcatcctcaccgccgaccgcgacctctaccaactcgtctccgaccgcgtcgccgtcctccaccccgagggccacctcatcaccccggagtggctttgggagaagtacggcctcaggccggagcagtgggtggacttccgcgccctcgtgggggacccctccgacaacctccccggggtcaagggcatcggggagaagaccgccctcaagctcctcaaggagtggggaagcctggaaaacctcctcaagaacctggaccgggtaaagccagaaaacgtccgggagaagatcaaggcccacctggaagacctcaggctctccttggagctctcccgggtgcgcaccgacctccccctggaggtggacctcgcccaggggcgggagcccgaccgggaggggcttagggccttcctggagaggctggagttcggcagcctcctccacgagttcggcctcctggaggcccccgcccccctggaggaggccccctggcccccgccggaaggggccttcgtgggcttcgtcctctcccgccccgagcccatgtgggcggagcttaaagccctggccgcctgcagggacggccgggtgcaccgggcagcagaccccttggcggggctaaaggacctcaaggaggtccggggcctcctcgccaaggacctcgccgtcttggcctcgagggaggggctagacctcgtgcccggggacgaccccatgctcctcgcctacctcctggacccctccaacaccacccccgagggggtggcgcggcgctacgggggggagtggacggaggacgccgcccaccgggccctcctctcggagaggctccatcggaacctccttaagcgcctcgagggggaggagaagctcctttggctctaccacgaggtggaaaagcccctctcccgggtcctggcccacatggaggccaccggggtacggcgggacgtggcctaccttcaggccctttccctggagcttgcggaggagatccgccgcctcgaggaggaggtcttccgcttggcgggccaccccttcaacctcaactcccgggaccagctggaaagggtgctctttgacgagcttaggcttcccgccttggggaagacgcaaaagacaggcaagcgctccaccagcgccgcggtgctggaggccctacgggaggcccaccccatcgtggagaagatcctccagcaccgggagctcaccaagctcaagaacacctacgtggaccccctcccaagcctcgtccacccgaggacgggccgcctccacacccgcttcaaccagacggccacggccacggggaggcttagtagcaaagaccccaacctgcagaacatccccgtccgcacccccttgggccagaggatccgccgggccttcgtggccgaggcgggttgggcgttggtggccctggactatagccagatagagctccgcgtcctcgcccacctctccggggacgaaaacctgatcagggtcttccaggaggggaaggacatccacacccagaccgcaagctggatgttcggcgtccccccggaggccgtggaccccctgatgcgccgggcggccaagacggtgaacttcggcgtcctctacggcatgtccgcccataggctctcccaggagcttgccatcccctacgaggaggcggtggcctttatagagcgctacttccaaagcttccccaaggtgcgggcctggatagaaaagaccctggaggaggggaggaagcggggctacgtggaaaccctcttcggaagaaggcgctacgtgcccgacctcaacgcccgggtgaagagcgtcagggaggccgcggagcgcatggccttcaacatgcccgtccagggcaccgccgccgacctcatgaagctcgccatggtgaagctcttcccccgcctccgggagatgggggcccgcatgctcctccaggtccacgacgagctcctcctggaggccccccaagcgcgggccgaggaggtggcggctttggccaaggaggccatggagaaggcctatcccctcgccgtgcccctggaggtggaggtggggatgggggaggactggctttccgccaagggttaggggggccctgccgtttagaggaagttcaaggggttgtccctcagaaacgcctccaggggaacgccctctgggcctaccaggaggcctttagccccaaaggtgcgggtgaaggcttccaggccctggg

SEQ ID NO: 3538 - DNA, 3221 bp, Artificial Sequence
  Description of Artificial Sequence: Synthetic DNA sequence of Thermus thermophilus DNA Polymerase S579M
tctagaggaagcatgagcctcaccctggcagacaaggtggtctacgaggaggagatccagaaaagccgcttcatcgccaaggcggcccccgtggcctcggaggaggaggccttggcgtttttggccgagaaccgggagcctgaggccacccacaacggccacgcctacaagatcggcctcctctaccgcttctctgacgacggggagccctcgggcaccgcaggcaggcccatcctccacgccatagaggcccagggcctggaccgggtggcggtcctggtggtgcgctacttcggcggggtgaagctcggggccggggggcttgtgcgggcctacgggggggtggcggcggaggccttaaggcgggcgcccaaggtccccttggtggagcgggtggggctcgccttcctcgtgcccttcgccgaggtgggccgggtctacgccctcctggaggcccgcgcccctgaaggccgaggagacctacaccccggaggcgtgcgcttcgccctcctcctccccaagcccgagcgggaaggtttcctcagggcgctcctggacgccacccggggacaggtggccctggagtagcatggaggcgatgcttccgctctttgaacccaaaggccgggtcctcctggtggacggccaccacctggcctaccgcaccttcttcgccctgaagggcctcaccacgagccggggcgaaccggtgcaggcggtctacggcttcgccaagagcctcctcaaggccctgaaggaggacgggtacaaggccgtcttcgtggtctttgacgccaaggccccctccttccgccacgaggcctacgaggcctacaaggcggggagggccccgacccccgaggacttcccccggcagctcgccctcatcaaggagctggtggacctcctggggtttacccgcctcgaggtccccggctacgaggcggacgacgttctcgccaccctggccaagaaggcggaaaaggaggggtacgaggtgcgcatcctcaccgccgaccgcgacctctaccaactcgtctccgaccgcgtcgccgtcctccaccccgagggccacctcatcaccccggagtggctttgggagaagtacggcctcaggccggagcagtgggtggacttccgcgccctcgtgggggacccctccgacaacctccccggggtcaagggcatcggggagaagaccgccctcaagctcctcaaggagtggggaagcctggaaaacctcctcaagaacctggaccgggtaaagccagaaaacgtccgggagaagatcaaggcccacctggaagacctcaggctctccttggagctctcccgggtgcgcaccgacctccccctggaggtggacctcgcccaggggcgggagcccgaccgggaggggcttagggccttcctggagaggctggagttcggcagcctcctccacgagttcggcctcctggaggcccccgcccccctggaggaggccccctggcccccgccggaaggggccttcgtgggcttcgtcctctcccgccccgagcccatgtgggcggagcttaaagccctggccgcctgcagggacggccgggtgcaccgggcagcagaccccttggcggggctaaaggacctcaaggaggtccggggcctcctcgccaaggacctcgccgtcttggcctcgagggaggggctagacctcgtgcccggggacgaccccatgctcctcgcctacctcctggacccctccaacaccacccccgagggggtggcgcggcgctacgggggggagtggacggaggacgccgcccaccgggccctcctctcggagaggctccatcggaacctccttaagcgcctcgagggggaggagaagctcctttggctctaccacgaggtggaaaagcccctctcccgggtcctggcccacatggaggccaccggggtacggcgggacgtggcctaccttcaggccctttccctggagcttgcggaggagatccgccgcctcgaggaggaggtcttccgcttggcgggccaccccttcaacctcaactcccgggaccagctggaaagggtgctctttgacgagcttaggcttcccgccttggggaagacgcaaaagacaggcaagcgctccaccagcgccgcggtgctggaggccctacgggaggcccaccccatcgtggagaagatcctccagcaccgggagctcaccaagctcaagaacacctacgtggaccccctcccaagcctcgtccacccgaggacgggccgcctccacacccgcttcaaccagacggccacggccacggggaggcttagtagcatggaccccaacctgcagaacatccccgtccgcacccccttgggccagaggatccgccgggccttcgtggccgaggcgggttgggcgttggtggccctggactatagccagatagagctccgcgtcctcgcccacctctccggggacgaaaacctgatcagggtcttccaggaggggaaggacatccacacccagaccgcaagctggatgttcggcgtccccccggaggccgtggaccccctgatgcgccgggcggccaagacggtgaacttcggcgtcctctacggcatgtccgcccataggctctcccaggagcttgccatcccctacgaggaggcggtggcctttatagagcgctacttccaaagcttccccaaggtgcgggcctggatagaaaagaccctggaggaggggaggaagcggggctacgtggaaaccctcttcggaagaaggcgctacgtgcccgacctcaacgcccgggtgaagagcgtcagggaggccgcggagcgcatggccttcaacatgcccgtccagggcaccgccgccgacctcatgaagctcgccatggtgaagctcttcccccgcctccgggagatgggggcccgcatgctcctccaggtccacgacgagctcctcctggaggccccccaagcgcgggccgaggaggtggcggctttggccaaggaggccatggagaaggcctatcccctcgccgtgcccctggaggtggaggtggggatgggggaggactggctttccgccaagggttaggggggccctgccgtttagaggaagttcaaggggttgtccctcagaaacgcctccaggggaacgccctctgggcctaccaggaggcctttagccccaaaggtgcgggtgaaggcttccaggccctggg

SEQ ID NO: 3539 - DNA, 3221 bp, Artificial Sequence
  Description of Artificial Sequence: Synthetic DNA sequence of Thermus thermophilus DNA Polymerase S579F
tctagaggaagcatgagcctcaccctggcagacaaggtggtctacgaggaggagatccagaaaagccgcttcatcgccaaggcggcccccgtggcctcggaggaggaggccttggcgtttttggccgagaaccgggagcctgaggccacccacaacggccacgcctacaagatcggcctcctctaccgcttctctgacgacggggagccctcgggcaccgcaggcaggcccatcctccacgccatagaggcccagggcctggaccgggtggcggtcctggtggtgcgctacttcggcggggtgaagctcggggccggggggcttgtgcgggcctacgggggggtggcggcggaggccttaaggcgggcgcccaaggtccccttggtggagcgggtggggctcgccttcctcgtgcccttcgccgaggtgggccgggtctacgccctcctggaggcccgcgcccctgaaggccgaggagacctacaccccggaggcgtgcgcttcgccctcctcctccccaagcccgagcgggaaggtttcctcagggcgctcctggacgccacccggggacaggtggccctggagtagcatggaggcgatgcttccgctctttgaacccaaaggccgggtcctcctggtggacggccaccacctggcctaccgcaccttcttcgccctgaagggcctcaccacgagccggggcgaaccggtgcaggcggtctacggcttcgccaagagcctcctcaaggccctgaaggaggacgggtacaaggccgtcttcgtggtctttgacgccaaggccccctccttccgccacgaggcctacgaggcctacaaggcggggagggccccgacccccgaggacttcccccggcagctcgccctcatcaaggagctggtggacctcctggggtttacccgcctcgaggtccccggctacgaggcggacgacgttctcgccaccctggccaagaaggcggaaaaggaggggtacgaggtgcgcatcctcaccgccgaccgcgacctctaccaactcgtctccgaccgcgtcgccgtcctccaccccgagggccacctcatcaccccggagtggctttgggagaagtacggcctcaggccggagcagtgggtggacttccgcgccctcgtgggggacccctccgacaacctccccggggtcaagggcatcggggagaagaccgccctcaagctcctcaaggagtggggaagcctggaaaacctcctcaagaacctggaccgggtaaagccagaaaacgtccgggagaagatcaaggcccacctggaagacctcaggctctccttggagctctcccgggtgcgcaccgacctccccctggaggtggacctcgcccaggggcgggagcccgaccgggaggggcttagggccttcctggagaggctggagttcggcagcctcctccacgagttcggcctcctggaggcccccgcccccctggaggaggccccctggcccccgccggaaggggccttcgtgggcttcgtcctctcccgccccgagcccatgtgggcggagcttaaagccctggccgcctgcagggacggccgggtgcaccgggcagcagaccccttggcggggctaaaggacctcaaggaggtccggggcctcctcgccaaggacctcgccgtcttggcctcgagggaggggctagacctcgtgcccggggacgaccccatgctcctcgcctacctcctggacccctccaacaccacccccgagggggtggcgcggcgctacgggggggagtggacggaggacgccgcccaccgggccctcctctcggagaggctccatcggaacctccttaagcgcctcgagggggaggagaagctcctttggctctaccacgaggtggaaaagcccctctcccgggtcctggcccacatggaggccaccggggtacggcgggacgtggcctaccttcaggccctttccctggagcttgcggaggagatccgccgcctcgaggaggaggtcttccgcttggcgggccaccccttcaacctcaactcccgggaccagctggaaagggtgctctttgacgagcttaggcttcccgccttggggaagacgcaaaagacaggcaagcgctccaccagcgccgcggtgctggaggccctacgggaggcccaccccatcgtggagaagatcctccagcaccgggagctcaccaagctcaagaacacctacgtggaccccctcccaagcctcgtccacccgaggacgggccgcctccacacccgcttcaaccagacggccacggccacggggaggcttagtagctttgaccccaacctgcagaacatccccgtccgcacccccttgggccagaggatccgccgggccttcgtggccgaggcgggttgggcgttggtggccctggactatagccagatagagctccgcgtcctcgcccacctctccggggacgaaaacctgatcagggtcttccaggaggggaaggacatccacacccagaccgcaagctggatgttcggcgtccccccggaggccgtggaccccctgatgcgccgggcggccaagacggtgaacttcggcgtcctctacggcatgtccgcccataggctctcccaggagcttgccatcccctacgaggaggcggtggcctttatagagcgctacttccaaagcttccccaaggtgcgggcctggatagaaaagaccctggaggaggggaggaagcggggctacgtggaaaccctcttcggaagaaggcgctacgtgcccgacctcaacgcccgggtgaagagcgtcagggaggccgcggagcgcatggccttcaacatgcccgtccagggcaccgccgccgacctcatgaagctcgccatggtgaagctcttcccccgcctccgggagatgggggcccgcatgctcctccaggtccacgacgagctcctcctggaggccccccaagcgcgggccgaggaggtggcggctttggccaaggaggccatggagaaggcctatcccctcgccgtgcccctggaggtggaggtggggatgggggaggactggctttccgccaagggttaggggggccctgccgtttagaggaagttcaaggggttgtccctcagaaacgcctccaggggaacgccctctgggcctaccaggaggcctttagccccaaaggtgcgggtgaaggcttccaggccctggg

SEQ ID NO: 3540 - DNA, 3221 bp, Artificial Sequence
  Description of Artificial Sequence: Synthetic DNA sequence of Thermus thermophilus DNA Polymerase S579P
tctagaggaagcatgagcctcaccctggcagacaaggtggtctacgaggaggagatccagaaaagccgcttcatcgccaaggcggcccccgtggcctcggaggaggaggccttggcgtttttggccgagaaccgggagcctgaggccacccacaacggccacgcctacaagatcggcctcctctaccgcttctctgacgacggggagccctcgggcaccgcaggcaggcccatcctccacgccatagaggcccagggcctggaccgggtggcggtcctggtggtgcgctacttcggcggggtgaagctcggggccggggggcttgtgcgggcctacgggggggtggcggcggaggccttaaggcgggcgcccaaggtccccttggtggagcgggtggggctcgccttcctcgtgcccttcgccgaggtgggccgggtctacgccctcctggaggcccgcgcccctgaaggccgaggagacctacaccccggaggcgtgcgcttcgccctcctcctccccaagcccgagcgggaaggtttcctcagggcgctcctggacgccacccggggacaggtggccctggagtagcatggaggcgatgcttccgctctttgaacccaaaggccgggtcctcctggtggacggccaccacctggcctaccgcaccttcttcgccctgaagggcctcaccacgagccggggcgaaccggtgcaggcggtctacggcttcgccaagagcctcctcaaggccctgaaggaggacgggtacaaggccgtcttcgtggtctttgacgccaaggccccctccttccgccacgaggcctacgaggcctacaaggcggggagggccccgacccccgaggacttcccccggcagctcgccctcatcaaggagctggtggacctcctggggtttacccgcctcgaggtccccggctacgaggcggacgacgttctcgccaccctggccaagaaggcggaaaaggaggggtacgaggtgcgcatcctcaccgccgaccgcgacctctaccaactcgtctccgaccgcgtcgccgtcctccaccccgagggccacctcatcaccccggagtggctttgggagaagtacggcctcaggccggagcagtgggtggacttccgcgccctcgtgggggacccctccgacaacctccccggggtcaagggcatcggggagaagaccgccctcaagctcctcaaggagtggggaagcctggaaaacctcctcaagaacctggaccgggtaaagccagaaaacgtccgggagaagatcaaggcccacctggaagacctcaggctctccttggagctctcccgggtgcgcaccgacctccccctggaggtggacctcgcccaggggcgggagcccgaccgggaggggcttagggccttcctggagaggctggagttcggcagcctcctccacgagttcggcctcctggaggcccccgcccccctggaggaggccccctggcccccgccggaaggggccttcgtgggcttcgtcctctcccgccccgagcccatgtgggcggagcttaaagccctggccgcctgcagggacggccgggtgcaccgggcagcagaccccttggcggggctaaaggacctcaaggaggtccggggcctcctcgccaaggacctcgccgtcttggcctcgagggaggggctagacctcgtgcccggggacgaccccatgctcctcgcctacctcctggacccctccaacaccacccccgagggggtggcgcggcgctacgggggggagtggacggaggacgccgcccaccgggccctcctctcggagaggctccatcggaacctccttaagcgcctcgagggggaggagaagctcctttggctctaccacgaggtggaaaagcccctctcccgggtcctggcccacatggaggccaccggggtacggcgggacgtggcctaccttcaggccctttccctggagcttgcggaggagatccgccgcctcgaggaggaggtcttccgcttggcgggccaccccttcaacctcaactcccgggaccagctggaaagggtgctctttgacgagcttaggcttcccgccttggggaagacgcaaaagacaggcaagcgctccaccagcgccgcggtgctggaggccctacgggaggcccaccccatcgtggagaagatcctccagcaccgggagctcaccaagctcaagaacacctacgtggaccccctcccaagcctcgtccacccgaggacgggccgcctccacacccgcttcaaccagacggccacggccacggggaggcttagtagccctgaccccaacctgcagaacatccccgtccgcacccccttgggccagaggatccgccgggccttcgtggccgaggcgggttgggcgttggtggccctggactatagccagatagagctccgcgtcctcgcccacctctccggggacgaaaacctgatcagggtcttccaggaggggaaggacatccacacccagaccgcaagctggatgttcggcgtccccccggaggccgtggaccccctgatgcgccgggcggccaagacggtgaacttcggcgtcctctacggcatgtccgcccataggctctcccaggagcttgccatcccctacgaggaggcggtggcctttatagagcgctacttccaaagcttccccaaggtgcgggcctggatagaaaagaccctggaggaggggaggaagcggggctacgtggaaaccctcttcggaagaaggcgctacgtgcccgacctcaacgcccgggtgaagagcgtcagggaggccgcggagcgcatggccttcaacatgcccgtccagggcaccgccgccgacctcatgaagctcgccatggtgaagctcttcccccgcctccgggagatgggggcccgcatgctcctccaggtccacgacgagctcctcctggaggccccccaagcgcgggccgaggaggtggcggctttggccaaggaggccatggagaaggcctatcccctcgccgtgcccctggaggtggaggtggggatgggggaggactggctttccgccaagggttaggggggccctgccgtttagaggaagttcaaggggttgtccctcagaaacgcctccaggggaacgccctctgggcctaccaggaggcctttagccccaaaggtgcgggtgaaggcttccaggccctggg

SEQ ID NO: 3541 - DNA, 3221 bp, Artificial Sequence
  Description of Artificial Sequence: Synthetic DNA sequence of Thermus thermophilus DNA Polymerase S579T
tctagaggaagcatgagcctcaccctggcagacaaggtggtctacgaggaggagatccagaaaagccgcttcatcgccaaggcggcccccgtggcctcggaggaggaggccttggcgtttttggccgagaaccgggagcctgaggccacccacaacggccacgcctacaagatcggcctcctctaccgcttctctgacgacggggagccctcgggcaccgcaggcaggcccatcctccacgccatagaggcccagggcctggaccgggtggcggtcctggtggtgcgctacttcggcggggtgaagctcggggccggggggcttgtgcgggcctacgggggggtggcggcggaggccttaaggcgggcgcccaaggtccccttggtggagcgggtggggctcgccttcctcgtgcccttcgccgaggtgggccgggtctacgccctcctggaggcccgcgcccctgaaggccgaggagacctacaccccggaggcgtgcgcttcgccctcctcctccccaagcccgagcgggaaggtttcctcagggcgctcctggacgccacccggggacaggtggccctggagtagcatggaggcgatgcttccgctctttgaacccaaaggccgggtcctcctggtggacggccaccacctggcctaccgcaccttcttcgccctgaagggcctcaccacgagccggggcgaaccggtgcaggcggtctacggcttcgccaagagcctcctcaaggccctgaaggaggacgggtacaaggccgtcttcgtggtctttgacgccaaggccccctccttccgccacgaggcctacgaggcctacaaggcggggagggccccgacccccgaggacttcccccggcagctcgccctcatcaaggagctggtggacctcctggggtttacccgcctcgaggtccccggctacgaggcggacgacgttctcgccaccctggccaagaaggcggaaaaggaggggtacgaggtgcgcatcctcaccgccgaccgcgacctctaccaactcgtctccgaccgcgtcgccgtcctccaccccgagggccacctcatcaccccggagtggctttgggagaagtacggcctcaggccggagcagtgggtggacttccgcgccctcgtgggggacccctccgacaacctccccggggtcaagggcatcggggagaagaccgccctcaagctcctcaaggagtggggaagcctggaaaacctcctcaagaacctggaccgggtaaagccagaaaacgtccgggagaagatcaaggcccacctggaagacctcaggctctccttggagctctcccgggtgcgcaccgacctccccctggaggtggacctcgcccaggggcgggagcccgaccgggaggggcttagggccttcctggagaggctggagttcggcagcctcctccacgagttcggcctcctggaggcccccgcccccctggaggaggccccctggcccccgccggaaggggccttcgtgggcttcgtcctctcccgccccgagcccatgtgggcggagcttaaagccctggccgcctgcagggacggccgggtgcaccgggcagcagaccccttggcggggctaaaggacctcaaggaggtccggggcctcctcgccaaggacctcgccgtcttggcctcgagggaggggctagacctcgtgcccggggacgaccccatgctcctcgcctacctcctggacccctccaacaccacccccgagggggtggcgcggcgctacgggggggagtggacggaggacgccgcccaccgggccctcctctcggagaggctccatcggaacctccttaagcgcctcgagggggaggagaagctcctttggctctaccacgaggtggaaaagcccctctcccgggtcctggcccacatggaggccaccggggtacggcgggacgtggcctaccttcaggccctttccctggagcttgcggaggagatccgccgcctcgaggaggaggtcttccgcttggcgggccaccccttcaacctcaactcccgggaccagctggaaagggtgctctttgacgagcttaggcttcccgccttggggaagacgcaaaagacaggcaagcgctccaccagcgccgcggtgctggaggccctacgggaggcccaccccatcgtggagaagatcctccagcaccgggagctcaccaagctcaagaacacctacgtggaccccctcccaagcctcgtccacccgaggacgggccgcctccacacccgcttcaaccagacggccacggccacggggaggcttagtagcactgaccccaacctgcagaacatccccgtccgcacccccttgggccagaggatccgccgggccttcgtggccgaggcgggttgggcgttggtggccctggactatagccagatagagctccgcgtcctcgcccacctctccggggacgaaaacctgatcagggtcttccaggaggggaaggacatccacacccagaccgcaagctggatgttcggcgtccccccggaggccgtggaccccctgatgcgccgggcggccaagacggtgaacttcggcgtcctctacggcatgtccgcccataggctctcccaggagcttgccatcccctacgaggaggcggtggcctttatagagcgctacttccaaagcttccccaaggtgcgggcctggatagaaaagaccctggaggaggggaggaagcggggctacgtggaaaccctcttcggaagaaggcgctacgtgcccgacctcaacgcccgggtgaagagcgtcagggaggccgcggagcgcatggccttcaacatgcccgtccagggcaccgccgccgacctcatgaagctcgccatggtgaagctcttcccccgcctccgggagatgggggcccgcatgctcctccaggtccacgacgagctcctcctggaggccccccaagcgcgggccgaggaggtggcggctttggccaaggaggccatggagaaggcctatcccctcgccgtgcccctggaggtggaggtggggatgggggaggactggctttccgccaagggttaggggggccctgccgtttagaggaagttcaaggggttgtccctcagaaacgcctccaggggaacgccctctgggcctaccaggaggcctttagccccaaaggtgcgggtgaaggcttccaggccctggg

SEQ ID NO: 3542 - DNA, 3221 bp, Artificial Sequence
  Description of Artificial Sequence: Synthetic DNA sequence of Thermus thermophilus DNA Polymerase S579W
tctagaggaagcatgagcctcaccctggcagacaaggtggtctacgaggaggagatccagaaaagccgcttcatcgccaaggcggcccccgtggcctcggaggaggaggccttggcgtttttggccgagaaccgggagcctgaggccacccacaacggccacgcctacaagatcggcctcctctaccgcttctctgacgacggggagccctcgggcaccgcaggcaggcccatcctccacgccatagaggcccagggcctggaccgggtggcggtcctggtggtgcgctacttcggcggggtgaagctcggggccggggggcttgtgcgggcctacgggggggtggcggcggaggccttaaggcgggcgcccaaggtccccttggtggagcgggtggggctcgccttcctcgtgcccttcgccgaggtgggccgggtctacgccctcctggaggcccgcgcccctgaaggccgaggagacctacaccccggaggcgtgcgcttcgccctcctcctccccaagcccgagcgggaaggtttcctcagggcgctcctggacgccacccggggacaggtggccctggagtagcatggaggcgatgcttccgctctttgaacccaaaggccgggtcctcctggtggacggccaccacctggcctaccgcaccttcttcgccctgaagggcctcaccacgagccggggcgaaccggtgcaggcggtctacggcttcgccaagagcctcctcaaggccctgaaggaggacgggtacaaggccgtcttcgtggtctttgacgccaaggccccctccttccgccacgaggcctacgaggcctacaaggcggggagggccccgacccccgaggacttcccccggcagctcgccctcatcaaggagctggtggacctcctggggtttacccgcctcgaggtccccggctacgaggcggacgacgttctcgccaccctggccaagaaggcggaaaaggaggggtacgaggtgcgcatcctcaccgccgaccgcgacctctaccaactcgtctccgaccgcgtcgccgtcctccaccccgagggccacctcatcaccccggagtggctttgggagaagtacggcctcaggccggagcagtgggtggacttccgcgccctcgtgggggacccctccgacaacctccccggggtcaagggcatcggggagaagaccgccctcaagctcctcaaggagtggggaagcctggaaaacctcctcaagaacctggaccgggtaaagccagaaaacgtccgggagaagatcaaggcccacctggaagacctcaggctctccttggagctctcccgggtgcgcaccgacctccccctggaggtggacctcgcccaggggcgggagcccgaccgggaggggcttagggccttcctggagaggctggagttcggcagcctcctccacgagttcggcctcctggaggcccccgcccccctggaggaggccccctggcccccgccggaaggggccttcgtgggcttcgtcctctcccgccccgagcccatgtgggcggagcttaaagccctggccgcctgcagggacggccgggtgcaccgggcagcagaccccttggcggggctaaaggacctcaaggaggtccggggcctcctcgccaaggacctcgccgtcttggcctcgagggaggggctagacctcgtgcccggggacgaccccatgctcctcgcctacctcctggacccctccaacaccacccccgagggggtggcgcggcgctacgggggggagtggacggaggacgccgcccaccgggccctcctctcggagaggctccatcggaacctccttaagcgcctcgagggggaggagaagctcctttggctctaccacgaggtggaaaagcccctctcccgggtcctggcccacatggaggccaccggggtacggcgggacgtggcctaccttcaggccctttccctggagcttgcggaggagatccgccgcctcgaggaggaggtcttccgcttggcgggccaccccttcaacctcaactcccgggaccagctggaaagggtgctctttgacgagcttaggcttcccgccttggggaagacgcaaaagacaggcaagcgctccaccagcgccgcggtgctggaggccctacgggaggcccaccccatcgtggagaagatcctccagcaccgggagctcaccaagctcaagaacacctacgtggaccccctcccaagcctcgtccacccgaggacgggccgcctccacacccgcttcaaccagacggccacggccacggggaggcttagtagctgggaccccaacctgcagaacatccccgtccgcacccccttgggccagaggatccgccgggccttcgtggccgaggcgggttgggcgttggtggccctggactatagccagatagagctccgcgtcctcgcccacctctccggggacgaaaacctgatcagggtcttccaggaggggaaggacatccacacccagaccgcaagctggatgttcggcgtccccccggaggccgtggaccccctgatgcgccgggcggccaagacggtgaacttcggcgtcctctacggcatgtccgcccataggctctcccaggagcttgccatcccctacgaggaggcggtggcctttatagagcgctacttccaaagcttccccaaggtgcgggcctggatagaaaagaccctggaggaggggaggaagcggggctacgtggaaaccctcttcggaagaaggcgctacgtgcccgacctcaacgcccgggtgaagagcgtcagggaggccgcggagcgcatggccttcaacatgcccgtccagggcaccgccgccgacctcatgaagctcgccatggtgaagctcttcccccgcctccgggagatgggggcccgcatgctcctccaggtccacgacgagctcctcctggaggccccccaagcgcgggccgaggaggtggcggctttggccaaggaggccatggagaaggcctatcccctcgccgtgcccctggaggtggaggtggggatgggggaggactggctttccgccaagggttaggggggccctgccgtttagaggaagttcaaggggttgtccctcagaaacgcctccaggggaacgccctctgggcctaccaggaggcctttagccccaaaggtgcgggtgaaggcttccaggccctggg

SEQ ID NO: 3543 - DNA, 3221 bp, Artificial Sequence
  Description of Artificial Sequence: Synthetic DNA sequence of Thermus thermophilus DNA Polymerase S579Y
tctagaggaagcatgagcctcaccctggcagacaaggtggtctacgaggaggagatccagaaaagccgcttcatcgccaaggcggcccccgtggcctcggaggaggaggccttggcgtttttggccgagaaccgggagcctgaggccacccacaacggccacgcctacaagatcggcctcctctaccgcttctctgacgacggggagccctcgggcaccgcaggcaggcccatcctccacgccatagaggcccagggcctggaccgggtggcggtcctggtggtgcgctacttcggcggggtgaagctcggggccggggggcttgtgcgggcctacgggggggtggcggcggaggccttaaggcgggcgcccaaggtccccttggtggagcgggtggggctcgccttcctcgtgcccttcgccgaggtgggccgggtctacgccctcctggaggcccgcgcccctgaaggccgaggagacctacaccccggaggcgtgcgcttcgccctcctcctccccaagcccgagcgggaaggtttcctcagggcgctcctggacgccacccggggacaggtggccctggagtagcatggaggcgatgcttccgctctttgaacccaaaggccgggtcctcctggtggacggccaccacctggcctaccgcaccttcttcgccctgaagggcctcaccacgagccggggcgaaccggtgcaggcggtctacggcttcgccaagagcctcctcaaggccctgaaggaggacgggtacaaggccgtcttcgtggtctttgacgccaaggccccctccttccgccacgaggcctacgaggcctacaaggcggggagggccccgacccccgaggacttcccccggcagctcgccctcatcaaggagctggtggacctcctggggtttacccgcctcgaggtccccggctacgaggcggacgacgttctcgccaccctggccaagaaggcggaaaaggaggggtacgaggtgcgcatcctcaccgccgaccgcgacctctaccaactcgtctccgaccgcgtcgccgtcctccaccccgagggccacctcatcaccccggagtggctttgggagaagtacggcctcaggccggagcagtgggtggacttccgcgccctcgtgggggacccctccgacaacctccccggggtcaagggcatcggggagaagaccgccctcaagctcctcaaggagtggggaagcctggaaaacctcctcaagaacctggaccgggtaaagccagaaaacgtccgggagaagatcaaggcccacctggaagacctcaggctctccttggagctctcccgggtgcgcaccgacctccccctggaggtggacctcgcccaggggcgggagcccgaccgggaggggcttagggccttcctggagaggctggagttcggcagcctcctccacgagttcggcctcctggaggcccccgcccccctggaggaggccccctggcccccgccggaaggggccttcgtgggcttcgtcctctcccgccccgagcccatgtgggcggagcttaaagccctggccgcctgcagggacggccgggtgcaccgggcagcagaccccttggcggggctaaaggacctcaaggaggtccggggcctcctcgccaaggacctcgccgtcttggcctcgagggaggggctagacctcgtgcccggggacgaccccatgctcctcgcctacctcctggacccctccaacaccacccccgagggggtggcgcggcgctacgggggggagtggacggaggacgccgcccaccgggccctcctctcggagaggctccatcggaacctccttaagcgcctcgagggggaggagaagctcctttggctctaccacgaggtggaaaagcccctctcccgggtcctggcccacatggaggccaccggggtacggcgggacgtggcctaccttcaggccctttccctggagcttgcggaggagatccgccgcctcgaggaggaggtcttccgcttggcgggccaccccttcaacctcaactcccgggaccagctggaaagggtgctctttgacgagcttaggcttcccgccttggggaagacgcaaaagacaggcaagcgctccaccagcgccgcggtgctggaggccctacgggaggcccaccccatcgtggagaagatcctccagcaccgggagctcaccaagctcaagaacacctacgtggaccccctcccaagcctcgtccacccgaggacgggccgcctccacacccgcttcaaccagacggccacggccacggggaggcttagtagctatgaccccaacctgcagaacatccccgtccgcacccccttgggccagaggatccgccgggccttcgtggccgaggcgggttgggcgttggtggccctggactatagccagatagagctccgcgtcctcgcccacctctccggggacgaaaacctgatcagggtcttccaggaggggaaggacatccacacccagaccgcaagctggatgttcggcgtccccccggaggccgtggaccccctgatgcgccgggcggccaagacggtgaacttcggcgtcctctacggcatgtccgcccataggctctcccaggagcttgccatcccctacgaggaggcggtggcctttatagagcgctacttccaaagcttccccaaggtgcgggcctggatagaaaagaccctggaggaggggaggaagcggggctacgtggaaaccctcttcggaagaaggcgctacgtgcccgacctcaacgcccgggtgaagagcgtcagggaggccgcggagcgcatggccttcaacatgcccgtccagggcaccgccgccgacctcatgaagctcgccatggtgaagctcttcccccgcctccgggagatgggggcccgcatgctcctccaggtccacgacgagctcctcctggaggccccccaagcgcgggccgaggaggtggcggctttggccaaggaggccatggagaaggcctatcccctcgccgtgcccctggaggtggaggtggggatgggggaggactggctttccgccaagggttaggggggccctgccgtttagaggaagttcaaggggttgtccctcagaaacgcctccaggggaacgccctctgggcctaccaggaggcctttagccccaaaggtgcgggtgaaggcttccaggccctggg

SEQ ID NO: 3544 - DNA, 3221 bp, Artificial Sequence
  Description of Artificial Sequence: Synthetic DNA sequence of Thermus thermophilus DNA Polymerase S579V
tctagaggaagcatgagcctcaccctggcagacaaggtggtctacgaggaggagatccagaaaagccgcttcatcgccaaggcggcccccgtggcctcggaggaggaggccttggcgtttttggccgagaaccgggagcctgaggccacccacaacggccacgcctacaagatcggcctcctctaccgcttctctgacgacggggagccctcgggcaccgcaggcaggcccatcctccacgccatagaggcccagggcctggaccgggtggcggtcctggtggtgcgctacttcggcggggtgaagctcggggccggggggcttgtgcgggcctacgggggggtggcggcggaggccttaaggcgggcgcccaaggtccccttggtggagcgggtggggctcgccttcctcgtgcccttcgccgaggtgggccgggtctacgccctcctggaggcccgcgcccctgaaggccgaggagacctacaccccggaggcgtgcgcttcgccctcctcctccccaagcccgagcgggaaggtttcctcagggcgctcctggacgccacccggggacaggtggccctggagtagcatggaggcgatgcttccgctctttgaacccaaaggccgggtcctcctggtggacggccaccacctggcctaccgcaccttcttcgccctgaagggcctcaccacgagccggggcgaaccggtgcaggcggtctacggcttcgccaagagcctcctcaaggccctgaaggaggacgggtacaaggccgtcttcgtggtctttgacgccaaggccccctccttccgccacgaggcctacgaggcctacaaggcggggagggccccgacccccgaggacttcccccggcagctcgccctcatcaaggagctggtggacctcctggggtttacccgcctcgaggtccccggctacgaggcggacgacgttctcgccaccctggccaagaaggcggaaaaggaggggtacgaggtgcgcatcctcaccgccgaccgcgacctctaccaactcgtctccgaccgcgtcgccgtcctccaccccgagggccacctcatcaccccggagtggctttgggagaagtacggcctcaggccggagcagtgggtggacttccgcgccctcgtgggggacccctccgacaacctccccggggtcaagggcatcggggagaagaccgccctcaagctcctcaaggagtggggaagcctggaaaacctcctcaagaacctggaccgggtaaagccagaaaacgtccgggagaagatcaaggcccacctggaagacctcaggctctccttggagctctcccgggtgcgcaccgacctccccctggaggtggacctcgcccaggggcgggagcccgaccgggaggggcttagggccttcctggagaggctggagttcggcagcctcctccacgagttcggcctcctggaggcccccgcccccctggaggaggccccctggcccccgccggaaggggccttcgtgggcttcgtcctctcccgccccgagcccatgtgggcggagcttaaagccctggccgcctgcagggacggccgggtgcaccgggcagcagaccccttggcggggctaaaggacctcaaggaggtccggggcctcctcgccaaggacctcgccgtcttggcctcgagggaggggctagacctcgtgcccggggacgaccccatgctcctcgcctacctcctggacccctccaacaccacccccgagggggtggcgcggcgctacgggggggagtggacggaggacgccgcccaccgggccctcctctcggagaggctccatcggaacctccttaagcgcctcgagggggaggagaagctcctttggctctaccacgaggtggaaaagcccctctcccgggtcctggcccacatggaggccaccggggtacggcgggacgtggcctaccttcaggccctttccctggagcttgcggaggagatccgccgcctcgaggaggaggtcttccgcttggcgggccaccccttcaacctcaactcccgggaccagctggaaagggtgctctttgacgagcttaggcttcccgccttggggaagacgcaaaagacaggcaagcgctccaccagcgccgcggtgctggaggccctacgggaggcccaccccatcgtggagaagatcctccagcaccgggagctcaccaagctcaagaacacctacgtggaccccctcccaagcctcgtccacccgaggacgggccgcctccacacccgcttcaaccagacggccacggccacggggaggcttagtagcgttgaccccaacctgcagaacatccccgtccgcacccccttgggccagaggatccgccgggccttcgtggccgaggcgggttgggcgttggtggccctggactatagccagatagagctccgcgtcctcgcccacctctccggggacgaaaacctgatcagggtcttccaggaggggaaggacatccacacccagaccgcaagctggatgttcggcgtccccccggaggccgtggaccccctgatgcgccgggcggccaagacggtgaacttcggcgtcctctacggcatgtccgcccataggctctcccaggagcttgccatcccctacgaggaggcggtggcctttatagagcgctacttccaaagcttccccaaggtgcgggcctggatagaaaagaccctggaggaggggaggaagcggggctacgtggaaaccctcttcggaagaaggcgctacgtgcccgacctcaacgcccgggtgaagagcgtcagggaggccgcggagcgcatggccttcaacatgcccgtccagggcaccgccgccgacctcatgaagctcgccatggtgaagctcttcccccgcctccgggagatgggggcccgcatgctcctccaggtccacgacgagctcctcctggaggccccccaagcgcgggccgaggaggtggcggctttggccaaggaggccatggagaaggcctatcccctcgccgtgcccctggaggtggaggtggggatgggggaggactggctttccgccaagggttaggggggccctgccgtttagaggaagttcaaggggttgtccctcagaaacgcctccaggggaacgccctctgggcctaccaggaggcctttagccccaaaggtgcgggtgaaggcttccaggccctggg

SEQ ID NO: 3545 - DNA, 3221 bp, Artificial Sequence
  Description of Artificial Sequence: Synthetic DNA sequence of Thermus thermophilus DNA Polymerase D580A
tctagaggaagcatgagcctcaccctggcagacaaggtggtctacgaggaggagatccagaaaagccgcttcatcgccaaggcggcccccgtggcctcggaggaggaggccttggcgtttttggccgagaaccgggagcctgaggccacccacaacggccacgcctacaagatcggcctcctctaccgcttctctgacgacggggagccctcgggcaccgcaggcaggcccatcctccacgccatagaggcccagggcctggaccgggtggcggtcctggtggtgcgctacttcggcggggtgaagctcggggccggggggcttgtgcgggcctacgggggggtggcggcggaggccttaaggcgggcgcccaaggtccccttggtggagcgggtggggctcgccttcctcgtgcccttcgccgaggtgggccgggtctacgccctcctggaggcccgcgcccctgaaggccgaggagacctacaccccggaggcgtgcgcttcgccctcctcctccccaagcccgagcgggaaggtttcctcagggcgctcctggacgccacccggggacaggtggccctggagtagcatggaggcgatgcttccgctctttgaacccaaaggccgggtcctcctggtggacggccaccacctggcctaccgcaccttcttcgccctgaagggcctcaccacgagccggggcgaaccggtgcaggcggtctacggcttcgccaagagcctcctcaaggccctgaaggaggacgggtacaaggccgtcttcgtggtctttgacgccaaggccccctccttccgccacgaggcctacgaggcctacaaggcggggagggccccgacccccgaggacttcccccggcagctcgccctcatcaaggagctggtggacctcctggggtttacccgcctcgaggtccccggctacgaggcggacgacgttctcgccaccctggccaagaaggcggaaaaggaggggtacgaggtgcgcatcctcaccgccgaccgcgacctctaccaactcgtctccgaccgcgtcgccgtcctccaccccgagggccacctcatcaccccggagtggctttgggagaagtacggcctcaggccggagcagtgggtggacttccgcgccctcgtgggggacccctccgacaacctccccggggtcaagggcatcggggagaagaccgccctcaagctcctcaaggagtggggaagcctggaaaacctcctcaagaacctggaccgggtaaagccagaaaacgtccgggagaagatcaaggcccacctggaagacctcaggctctccttggagctctcccgggtgcgcaccgacctccccctggaggtggacctcgcccaggggcgggagcccgaccgggaggggcttagggccttcctggagaggctggagttcggcagcctcctccacgagttcggcctcctggaggcccccgcccccctggaggaggccccctggcccccgccggaaggggccttcgtgggcttcgtcctctcccgccccgagcccatgtgggcggagcttaaagccctggccgcctgcagggacggccgggtgcaccgggcagcagaccccttggcggggctaaaggacctcaaggaggtccggggcctcctcgccaaggacctcgccgtcttggcctcgagggaggggctagacctcgtgcccggggacgaccccatgctcctcgcctacctcctggacccctccaacaccacccccgagggggtggcgcggcgctacgggggggagtggacggaggacgccgcccaccgggccctcctctcggagaggctccatcggaacctccttaagcgcctcgagggggaggagaagctcctttggctctaccacgaggtggaaaagcccctctcccgggtcctggcccacatggaggccaccggggtacggcgggacgtggcctaccttcaggccctttccctggagcttgcggaggagatccgccgcctcgaggaggaggtcttccgcttggcgggccaccccttcaacctcaactcccgggaccagctggaaagggtgctctttgacgagcttaggcttcccgccttggggaagacgcaaaagacaggcaagcgctccaccagcgccgcggtgctggaggccctacgggaggcccaccccatcgtggagaagatcctccagcaccgggagctcaccaagctcaagaacacctacgtggaccccctcccaagcctcgtccacccgaggacgggccgcctccacacccgcttcaaccagacggccacggccacggggaggcttagtagctccgctcccaacctgcagaacatccccgtccgcacccccttgggccagaggatccgccgggccttcgtggccgaggcgggttgggcgttggtggccctggactatagccagatagagctccgcgtcctcgcccacctctccggggacgaaaacctgatcagggtcttccaggaggggaaggacatccacacccagaccgcaagctggatgttcggcgtccccccggaggccgtggaccccctgatgcgccgggcggccaagacggtgaacttcggcgtcctctacggcatgtccgcccataggctctcccaggagcttgccatcccctacgaggaggcggtggcctttatagagcgctacttccaaagcttccccaaggtgcgggcctggatagaaaagaccctggaggaggggaggaagcggggctacgtggaaaccctcttcggaagaaggcgctacgtgcccgacctcaacgcccgggtgaagagcgtcagggaggccgcggagcgcatggccttcaacatgcccgtccagggcaccgccgccgacctcatgaagctcgccatggtgaagctcttcccccgcctccgggagatgggggcccgcatgctcctccaggtccacgacgagctcctcctggaggccccccaagcgcgggccgaggaggtggcggctttggccaaggaggccatggagaaggcctatcccctcgccgtgcccctggaggtggaggtggggatgggggaggactggctttccgccaagggttaggggggccctgccgtttagaggaagttcaaggggttgtccctcagaaacgcctccaggggaacgccctctgggcctaccaggaggcctttagccccaaaggtgcgggtgaaggcttccaggccctggg

SEQ ID NO: 3546 - DNA, 3221 bp, Artificial Sequence
  Description of Artificial Sequence: Synthetic DNA sequence of Thermus thermophilus DNA Polymerase D580R
tctagaggaagcatgagcctcaccctggcagacaaggtggtctacgaggaggagatccagaaaagccgcttcatcgccaaggcggcccccgtggcctcggaggaggaggccttggcgtttttggccgagaaccgggagcctgaggccacccacaacggccacgcctacaagatcggcctcctctaccgcttctctgacgacggggagccctcgggcaccgcaggcaggcccatcctccacgccatagaggcccagggcctggaccgggtggcggtcctggtggtgcgctacttcggcggggtgaagctcggggccggggggcttgtgcgggcctacgggggggtggcggcggaggccttaaggcgggcgcccaaggtccccttggtggagcgggtggggctcgccttcctcgtgcccttcgccgaggtgggccgggtctacgccctcctggaggcccgcgcccctgaaggccgaggagacctacaccccggaggcgtgcgcttcgccctcctcctccccaagcccgagcgggaaggtttcctcagggcgctcctggacgccacccggggacaggtggccctggagtagcatggaggcgatgcttccgctctttgaacccaaaggccgggtcctcctggtggacggccaccacctggcctaccgcaccttcttcgccctgaagggcctcaccacgagccggggcgaaccggtgcaggcggtctacggcttcgccaagagcctcctcaaggccctgaaggaggacgggtacaaggccgtcttcgtggtctttgacgccaaggccccctccttccgccacgaggcctacgaggcctacaaggcggggagggccccgacccccgaggacttcccccggcagctcgccctcatcaaggagctggtggacctcctggggtttacccgcctcgaggtccccggctacgaggcggacgacgttctcgccaccctggccaagaaggcggaaaaggaggggtacgaggtgcgcatcctcaccgccgaccgcgacctctaccaactcgtctccgaccgcgtcgccgtcctccaccccgagggccacctcatcaccccggagtggctttgggagaagtacggcctcaggccggagcagtgggtggacttccgcgccctcgtgggggacccctccgacaacctccccggggtcaagggcatcggggagaagaccgccctcaagctcctcaaggagtggggaagcctggaaaacctcctcaagaacctggaccgggtaaagccagaaaacgtccgggagaagatcaaggcccacctggaagacctcaggctctccttggagctctcccgggtgcgcaccgacctccccctggaggtggacctcgcccaggggcgggagcccgaccgggaggggcttagggccttcctggagaggctggagttcggcagcctcctccacgagttcggcctcctggaggcccccgcccccctggaggaggccccctggcccccgccggaaggggccttcgtgggcttcgtcctctcccgccccgagcccatgtgggcggagcttaaagccctggccgcctgcagggacggccgggtgcaccgggcagcagaccccttggcggggctaaaggacctcaaggaggtccggggcctcctcgccaaggacctcgccgtcttggcctcgagggaggggctagacctcgtgcccggggacgaccccatgctcctcgcctacctcctggacccctccaacaccacccccgagggggtggcgcggcgctacgggggggagtggacggaggacgccgcccaccgggccctcctctcggagaggctccatcggaacctccttaagcgcctcgagggggaggagaagctcctttggctctaccacgaggtggaaaagcccctctcccgggtcctggcccacatggaggccaccggggtacggcgggacgtggcctaccttcaggccctttccctggagcttgcggaggagatccgccgcctcgaggaggaggtcttccgcttggcgggccaccccttcaacctcaactcccgggaccagctggaaagggtgctctttgacgagcttaggcttcccgccttggggaagacgcaaaagacaggcaagcgctccaccagcgccgcggtgctggaggccctacgggaggcccaccccatcgtggagaagatcctccagcaccgggagctcaccaagctcaagaacacctacgtggaccccctcccaagcctcgtccacccgaggacgggccgcctccacacccgcttcaaccagacggccacggccacggggaggcttagtagctcccgtcccaacctgcagaacatccccgtccgcacccccttgggccagaggatccgccgggccttcgtggccgaggcgggttgggcgttggtggccctggactatagccagatagagctccgcgtcctcgcccacctctccggggacgaaaacctgatcagggtcttccaggaggggaaggacatccacacccagaccgcaagctggatgttcggcgtccccccggaggccgtggaccccctgatgcgccgggcggccaagacggtgaacttcggcgtcctctacggcatgtccgcccataggctctcccaggagcttgccatcccctacgaggaggcggtggcctttatagagcgctacttccaaagcttccccaaggtgcgggcctggatagaaaagaccctggaggaggggaggaagcggggctacgtggaaaccctcttcggaagaaggcgctacgtgcccgacctcaacgcccgggtgaagagcgtcagggaggccgcggagcgcatggccttcaacatgcccgtccagggcaccgccgccgacctcatgaagctcgccatggtgaagctcttcccccgcctccgggagatgggggcccgcatgctcctccaggtccacgacgagctcctcctggaggccccccaagcgcgggccgaggaggtggcggctttggccaaggaggccatggagaaggcctatcccctcgccgtgcccctggaggtggaggtggggatgggggaggactggctttccgccaagggttaggggggccctgccgtttagaggaagttcaaggggttgtccctcagaaacgcctccaggggaacgccctctgggcctaccaggaggcctttagccccaaaggtgcgggtgaaggcttccaggccctggg

SEQ ID NO: 3547 - DNA, 3221 bp, Artificial Sequence
  Description of Artificial Sequence: Synthetic DNA sequence of Thermus thermophilus DNA Polymerase D580N
tctagaggaagcatgagcctcaccctggcagacaaggtggtctacgaggaggagatccagaaaagccgcttcatcgccaaggcggcccccgtggcctcggaggaggaggccttggcgtttttggccgagaaccgggagcctgaggccacccacaacggccacgcctacaagatcggcctcctctaccgcttctctgacgacggggagccctcgggcaccgcaggcaggcccatcctccacgccatagaggcccagggcctggaccgggtggcggtcctggtggtgcgctacttcggcggggtgaagctcggggccggggggcttgtgcgggcctacgggggggtggcggcggaggccttaaggcgggcgcccaaggtccccttggtggagcgggtggggctcgccttcctcgtgcccttcgccgaggtgggccgggtctacgccctcctggaggcccgcgcccctgaaggccgaggagacctacaccccggaggcgtgcgcttcgccctcctcctccccaagcccgagcgggaaggtttcctcagggcgctcctggacgccacccggggacaggtggccctggagtagcatggaggcgatgcttccgctctttgaacccaaaggccgggtcctcctggtggacggccaccacctggcctaccgcaccttcttcgccctgaagggcctcaccacgagccggggcgaaccggtgcaggcggtctacggcttcgccaagagcctcctcaaggccctgaaggaggacgggtacaaggccgtcttcgtggtctttgacgccaaggccccctccttccgccacgaggcctacgaggcctacaaggcggggagggccccgacccccgaggacttcccccggcagctcgccctcatcaaggagctggtggacctcctggggtttacccgcctcgaggtccccggctacgaggcggacgacgttctcgccaccctggccaagaaggcggaaaaggaggggtacgaggtgcgcatcctcaccgccgaccgcgacctctaccaactcgtctccgaccgcgtcgccgtcctccaccccgagggccacctcatcaccccggagtggctttgggagaagtacggcctcaggccggagcagtgggtggacttccgcgccctcgtgggggacccctccgacaacctccccggggtcaagggcatcggggagaagaccgccctcaagctcctcaaggagtggggaagcctggaaaacctcctcaagaacctggaccgggtaaagccagaaaacgtccgggagaagatcaaggcccacctggaagacctcaggctctccttggagctctcccgggtgcgcaccgacctccccctggaggtggacctcgcccaggggcgggagcccgaccgggaggggcttagggccttcctggagaggctggagttcggcagcctcctccacgagttcggcctcctggaggcccccgcccccctggaggaggccccctggcccccgccggaaggggccttcgtgggcttcgtcctctcccgccccgagcccatgtgggcggagcttaaagccctggccgcctgcagggacggccgggtgcaccgggcagcagaccccttggcggggctaaaggacctcaaggaggtccggggcctcctcgccaaggacctcgccgtcttggcctcgagggaggggctagacctcgtgcccggggacgaccccatgctcctcgcctacctcctggacccctccaacaccacccccgagggggtggcgcggcgctacgggggggagtggacggaggacgccgcccaccgggccctcctctcggagaggctccatcggaacctccttaagcgcctcgagggggaggagaagctcctttggctctaccacgaggtggaaaagcccctctcccgggtcctggcccacatggaggccaccggggtacggcgggacgtggcctaccttcaggccctttccctggagcttgcggaggagatccgccgcctcgaggaggaggtcttccgcttggcgggccaccccttcaacctcaactcccgggaccagctggaaagggtgctctttgacgagcttaggcttcccgccttggggaagacgcaaaagacaggcaagcgctccaccagcgccgcggtgctggaggccctacgggaggcccaccccatcgtggagaagatcctccagcaccgggagctcaccaagctcaagaacacctacgtggaccccctcccaagcctcgtccacccgaggacgggccgcctccacacccgcttcaaccagacggccacggccacggggaggcttagtagctccaatcccaacctgcagaacatccccgtccgcacccccttgggccagaggatccgccgggccttcgtggccgaggcgggttgggcgttggtggccctggactatagccagatagagctccgcgtcctcgcccacctctccggggacgaaaacctgatcagggtcttccaggaggggaaggacatccacacccagaccgcaagctggatgttcggcgtccccccggaggccgtggaccccctgatgcgccgggcggccaagacggtgaacttcggcgtcctctacggcatgtccgcccataggctctcccaggagcttgccatcccctacgaggaggcggtggcctttatagagcgctacttccaaagcttccccaaggtgcgggcctggatagaaaagaccctggaggaggggaggaagcggggctacgtggaaaccctcttcggaagaaggcgctacgtgcccgacctcaacgcccgggtgaagagcgtcagggaggccgcggagcgcatggccttcaacatgcccgtccagggcaccgccgccgacctcatgaagctcgccatggtgaagctcttcccccgcctccgggagatgggggcccgcatgctcctccaggtccacgacgagctcctcctggaggccccccaagcgcgggccgaggaggtggcggctttggccaaggaggccatggagaaggcctatcccctcgccgtgcccctggaggtggaggtggggatgggggaggactggctttccgccaagggttaggggggccctgccgtttagaggaagttcaaggggttgtccctcagaaacgcctccaggggaacgccctctgggcctaccaggaggcctttagccccaaaggtgcgggtgaaggcttccaggccctggg

SEQ ID NO: 3548 - DNA, 3221 bp, Artificial Sequence
  Description of Artificial Sequence: Synthetic DNA sequence of Thermus thermophilus DNA Polymerase D580C
tctagaggaagcatgagcctcaccctggcagacaaggtggtctacgaggaggagatccagaaaagccgcttcatcgccaaggcggcccccgtggcctcggaggaggaggccttggcgtttttggccgagaaccgggagcctgaggccacccacaacggccacgcctacaagatcggcctcctctaccgcttctctgacgacggggagccctcgggcaccgcaggcaggcccatcctccacgccatagaggcccagggcctggaccgggtggcggtcctggtggtgcgctacttcggcggggtgaagctcggggccggggggcttgtgcgggcctacgggggggtggcggcggaggccttaaggcgggcgcccaaggtccccttggtggagcgggtggggctcgccttcctcgtgcccttcgccgaggtgggccgggtctacgccctcctggaggcccgcgcccctgaaggccgaggagacctacaccccggaggcgtgcgcttcgccctcctcctccccaagcccgagcgggaaggtttcctcagggcgctcctggacgccacccggggacaggtggccctggagtagcatggaggcgatgcttccgctctttgaacccaaaggccgggtcctcctggtggacggccaccacctggcctaccgcaccttcttcgccctgaagggcctcaccacgagccggggcgaaccggtgcaggcggtctacggcttcgccaagagcctcctcaaggccctgaaggaggacgggtacaaggccgtcttcgtggtctttgacgccaaggccccctccttccgccacgaggcctacgaggcctacaaggcggggagggccccgacccccgaggacttcccccggcagctcgccctcatcaaggagctggtggacctcctggggtttacccgcctcgaggtccccggctacgaggcggacgacgttctcgccaccctggccaagaaggcggaaaaggaggggtacgaggtgcgcatcctcaccgccgaccgcgacctctaccaactcgtctccgaccgcgtcgccgtcctccaccccgagggccacctcatcaccccggagtggctttgggagaagtacggcctcaggccggagcagtgggtggacttccgcgccctcgtgggggacccctccgacaacctccccggggtcaagggcatcggggagaagaccgccctcaagctcctcaaggagtggggaagcctggaaaacctcctcaagaacctggaccgggtaaagccagaaaacgtccgggagaagatcaaggcccacctggaagacctcaggctctccttggagctctcccgggtgcgcaccgacctccccctggaggtggacctcgcccaggggcgggagcccgaccgggaggggcttagggccttcctggagaggctggagttcggcagcctcctccacgagttcggcctcctggaggcccccgcccccctggaggaggccccctggcccccgccggaaggggccttcgtgggcttcgtcctctcccgccccgagcccatgtgggcggagcttaaagccctggccgcctgcagggacggccgggtgcaccgggcagcagaccccttggcggggctaaaggacctcaaggaggtccggggcctcctcgccaaggacctcgccgtcttggcctcgagggaggggctagacctcgtgcccggggacgaccccatgctcctcgcctacctcctggacccctccaacaccacccccgagggggtggcgcggcgctacgggggggagtggacggaggacgccgcccaccgggccctcctctcggagaggctccatcggaacctccttaagcgcctcgagggggaggagaagctcctttggctctaccacgaggtggaaaagcccctctcccgggtcctggcccacatggaggccaccggggtacggcgggacgtggcctaccttcaggccctttccctggagcttgcggaggagatccgccgcctcgaggaggaggtcttccgcttggcgggccaccccttcaacctcaactcccgggaccagctggaaagggtgctctttgacgagcttaggcttcccgccttggggaagacgcaaaagacaggcaagcgctccaccagcgccgcggtgctggaggccctacgggaggcccaccccatcgtggagaagatcctccagcaccgggagctcaccaagctcaagaacacctacgtggaccccctcccaagcctcgtccacccgaggacgggccgcctccacacccgcttcaaccagacggccacggccacggggaggcttagtagctcctgtcccaacctgcagaacatccccgtccgcacccccttgggccagaggatccgccgggccttcgtggccgaggcgggttgggcgttggtggccctggactatagccagatagagctccgcgtcctcgcccacctctccggggacgaaaacctgatcagggtcttccaggaggggaaggacatccacacccagaccgcaagctggatgttcggcgtccccccggaggccgtggaccccctgatgcgccgggcggccaagacggtgaacttcggcgtcctctacggcatgtccgcccataggctctcccaggagcttgccatcccctacgaggaggcggtggcctttatagagcgctacttccaaagcttccccaaggtgcgggcctggatagaaaagaccctggaggaggggaggaagcggggctacgtggaaaccctcttcggaagaaggcgctacgtgcccgacctcaacgcccgggtgaagagcgtcagggaggccgcggagcgcatggccttcaacatgcccgtccagggcaccgccgccgacctcatgaagctcgccatggtgaagctcttcccccgcctccgggagatgggggcccgcatgctcctccaggtccacgacgagctcctcctggaggccccccaagcgcgggccgaggaggtggcggctttggccaaggaggccatggagaaggcctatcccctcgccgtgcccctggaggtggaggtggggatgggggaggactggctttccgccaagggttaggggggccctgccgtttagaggaagttcaaggggttgtccctcagaaacgcctccaggggaacgccctctgggcctaccaggaggcctttagccccaaaggtgcgggtgaaggcttccaggccctggg

SEQ ID NO: 3549 - DNA, 3221 bp, Artificial Sequence
  Description of Artificial Sequence: Synthetic DNA sequence of Thermus thermophilus DNA Polymerase D580E
tctagaggaagcatgagcctcaccctggcagacaaggtggtctacgaggaggagatccagaaaagccgcttcatcgccaaggcggcccccgtggcctcggaggaggaggccttggcgtttttggccgagaaccgggagcctgaggccacccacaacggccacgcctacaagatcggcctcctctaccgcttctctgacgacggggagccctcgggcaccgcaggcaggcccatcctccacgccatagaggcccagggcctggaccgggtggcggtcctggtggtgcgctacttcggcggggtgaagctcggggccggggggcttgtgcgggcctacgggggggtggcggcggaggccttaaggcgggcgcccaaggtccccttggtggagcgggtggggctcgccttcctcgtgcccttcgccgaggtgggccgggtctacgccctcctggaggcccgcgcccctgaaggccgaggagacctacaccccggaggcgtgcgcttcgccctcctcctccccaagcccgagcgggaaggtttcctcagggcgctcctggacgccacccggggacaggtggccctggagtagcatggaggcgatgcttccgctctttgaacccaaaggccgggtcctcctggtggacggccaccacctggcctaccgcaccttcttcgccctgaagggcctcaccacgagccggggcgaaccggtgcaggcggtctacggcttcgccaagagcctcctcaaggccctgaaggaggacgggtacaaggccgtcttcgtggtctttgacgccaaggccccctccttccgccacgaggcctacgaggcctacaaggcggggagggccccgacccccgaggacttcccccggcagctcgccctcatcaaggagctggtggacctcctggggtttacccgcctcgaggtccccggctacgaggcggacgacgttctcgccaccctggccaagaaggcggaaaaggaggggtacgaggtgcgcatcctcaccgccgaccgcgacctctaccaactcgtctccgaccgcgtcgccgtcctccaccccgagggccacctcatcaccccggagtggctttgggagaagtacggcctcaggccggagcagtgggtggacttccgcgccctcgtgggggacccctccgacaacctccccggggtcaagggcatcggggagaagaccgccctcaagctcctcaaggagtggggaagcctggaaaacctcctcaagaacctggaccgggtaaagccagaaaacgtccgggagaagatcaaggcccacctggaagacctcaggctctccttggagctctcccgggtgcgcaccgacctccccctggaggtggacctcgcccaggggcgggagcccgaccgggaggggcttagggccttcctggagaggctggagttcggcagcctcctccacgagttcggcctcctggaggcccccgcccccctggaggaggccccctggcccccgccggaaggggccttcgtgggcttcgtcctctcccgccccgagcccatgtgggcggagcttaaagccctggccgcctgcagggacggccgggtgcaccgggcagcagaccccttggcggggctaaaggacctcaaggaggtccggggcctcctcgccaaggacctcgccgtcttggcctcgagggaggggctagacctcgtgcccggggacgaccccatgctcctcgcctacctcctggacccctccaacaccacccccgagggggtggcgcggcgctacgggggggagtggacggaggacgccgcccaccgggccctcctctcggagaggctccatcggaacctccttaagcgcctcgagggggaggagaagctcctttggctctaccacgaggtggaaaagcccctctcccgggtcctggcccacatggaggccaccggggtacggcgggacgtggcctaccttcaggccctttccctggagcttgcggaggagatccgccgcctcgaggaggaggtcttccgcttggcgggccaccccttcaacctcaactcccgggaccagctggaaagggtgctctttgacgagcttaggcttcccgccttggggaagacgcaaaagacaggcaagcgctccaccagcgccgcggtgctggaggccctacgggaggcccaccccatcgtggagaagatcctccagcaccgggagctcaccaagctcaagaacacctacgtggaccccctcccaagcctcgtccacccgaggacgggccgcctccacacccgcttcaaccagacggccacggccacggggaggcttagtagctccgaacccaacctgcagaacatccccgtccgcacccccttgggccagaggatccgccgggccttcgtggccgaggcgggttgggcgttggtggccctggactatagccagatagagctccgcgtcctcgcccacctctccggggacgaaaacctgatcagggtcttccaggaggggaaggacatccacacccagaccgcaagctggatgttcggcgtccccccggaggccgtggaccccctgatgcgccgggcggccaagacggtgaacttcggcgtcctctacggcatgtccgcccataggctctcccaggagcttgccatcccctacgaggaggcggtggcctttatagagcgctacttccaaagcttccccaaggtgcgggcctggatagaaaagaccctggaggaggggaggaagcggggctacgtggaaaccctcttcggaagaaggcgctacgtgcccgacctcaacgcccgggtgaagagcgtcagggaggccgcggagcgcatggccttcaacatgcccgtccagggcaccgccgccgacctcatgaagctcgccatggtgaagctcttcccccgcctccgggagatgggggcccgcatgctcctccaggtccacgacgagctcctcctggaggccccccaagcgcgggccgaggaggtggcggctttggccaaggaggccatggagaaggcctatcccctcgccgtgcccctggaggtggaggtggggatgggggaggactggctttccgccaagggttaggggggccctgccgtttagaggaagttcaaggggttgtccctcagaaacgcctccaggggaacgccctctgggcctaccaggaggcctttagccccaaaggtgcgggtgaaggcttccaggccctggg

SEQ ID NO: 3550 - DNA, 3221 bp, Artificial Sequence
  Description of Artificial Sequence: Synthetic DNA sequence of Thermus thermophilus DNA Polymerase D580Q
tctagaggaagcatgagcctcaccctggcagacaaggtggtctacgaggaggagatccagaaaagccgcttcatcgccaaggcggcccccgtggcctcggaggaggaggccttggcgtttttggccgagaaccgggagcctgaggccacccacaacggccacgcctacaagatcggcctcctctaccgcttctctgacgacggggagccctcgggcaccgcaggcaggcccatcctccacgccatagaggcccagggcctggaccgggtggcggtcctggtggtgcgctacttcggcggggtgaagctcggggccggggggcttgtgcgggcctacgggggggtggcggcggaggccttaaggcgggcgcccaaggtccccttggtggagcgggtggggctcgccttcctcgtgcccttcgccgaggtgggccgggtctacgccctcctggaggcccgcgcccctgaaggccgaggagacctacaccccggaggcgtgcgcttcgccctcctcctccccaagcccgagcgggaaggtttcctcagggcgctcctggacgccacccggggacaggtggccctggagtagcatggaggcgatgcttccgctctttgaacccaaaggccgggtcctcctggtggacggccaccacctggcctaccgcaccttcttcgccctgaagggcctcaccacgagccggggcgaaccggtgcaggcggtctacggcttcgccaagagcctcctcaaggccctgaaggaggacgggtacaaggccgtcttcgtggtctttgacgccaaggccccctccttccgccacgaggcctacgaggcctacaaggcggggagggccccgacccccgaggacttcccccggcagctcgccctcatcaaggagctggtggacctcctggggtttacccgcctcgaggtccccggctacgaggcggacgacgttctcgccaccctggccaagaaggcggaaaaggaggggtacgaggtgcgcatcctcaccgccgaccgcgacctctaccaactcgtctccgaccgcgtcgccgtcctccaccccgagggccacctcatcaccccggagtggctttgggagaagtacggcctcaggccggagcagtgggtggacttccgcgccctcgtgggggacccctccgacaacctccccggggtcaagggcatcggggagaagaccgccctcaagctcctcaaggagtggggaagcctggaaaacctcctcaagaacctggaccgggtaaagccagaaaacgtccgggagaagatcaaggcccacctggaagacctcaggctctccttggagctctcccgggtgcgcaccgacctccccctggaggtggacctcgcccaggggcgggagcccgaccgggaggggcttagggccttcctggagaggctggagttcggcagcctcctccacgagttcggcctcctggaggcccccgcccccctggaggaggccccctggcccccgccggaaggggccttcgtgggcttcgtcctctcccgccccgagcccatgtgggcggagcttaaagccctggccgcctgcagggacggccgggtgcaccgggcagcagaccccttggcggggctaaaggacctcaaggaggtccggggcctcctcgccaaggacctcgccgtcttggcctcgagggaggggctagacctcgtgcccggggacgaccccatgctcctcgcctacctcctggacccctccaacaccacccccgagggggtggcgcggcgctacgggggggagtggacggaggacgccgcccaccgggccctcctctcggagaggctccatcggaacctccttaagcgcctcgagggggaggagaagctcctttggctctaccacgaggtggaaaagcccctctcccgggtcctggcccacatggaggccaccggggtacggcgggacgtggcctaccttcaggccctttccctggagcttgcggaggagatccgccgcctcgaggaggaggtcttccgcttggcgggccaccccttcaacctcaactcccgggaccagctggaaagggtgctctttgacgagcttaggcttcccgccttggggaagacgcaaaagacaggcaagcgctccaccagcgccgcggtgctggaggccctacgggaggcccaccccatcgtggagaagatcctccagcaccgggagctcaccaagctcaagaacacctacgtggaccccctcccaagcctcgtccacccgaggacgggccgcctccacacccgcttcaaccagacggccacggccacggggaggcttagtagctcccaacccaacctgcagaacatccccgtccgcacccccttgggccagaggatccgccgggccttcgtggccgaggcgggttgggcgttggtggccctggactatagccagatagagctccgcgtcctcgcccacctctccggggacgaaaacctgatcagggtcttccaggaggggaaggacatccacacccagaccgcaagctggatgttcggcgtccccccggaggccgtggaccccctgatgcgccgggcggccaagacggtgaacttcggcgtcctctacggcatgtccgcccataggctctcccaggagcttgccatcccctacgaggaggcggtggcctttatagagcgctacttccaaagcttccccaaggtgcgggcctggatagaaaagaccctggaggaggggaggaagcggggctacgtggaaaccctcttcggaagaaggcgctacgtgcccgacctcaacgcccgggtgaagagcgtcagggaggccgcggagcgcatggccttcaacatgcccgtccagggcaccgccgccgacctcatgaagctcgccatggtgaagctcttcccccgcctccgggagatgggggcccgcatgctcctccaggtccacgacgagctcctcctggaggccccccaagcgcgggccgaggaggtggcggctttggccaaggaggccatggagaaggcctatcccctcgccgtgcccctggaggtggaggtggggatgggggaggactggctttccgccaagggttaggggggccctgccgtttagaggaagttcaaggggttgtccctcagaaacgcctccaggggaacgccctctgggcctaccaggaggcctttagccccaaaggtgcgggtgaaggcttccaggccctggg

SEQ ID NO: 3551 - DNA, 3221 bp, Artificial Sequence
  Description of Artificial Sequence: Synthetic DNA sequence of Thermus thermophilus DNA Polymerase D580G
tctagaggaagcatgagcctcaccctggcagacaaggtggtctacgaggaggagatccagaaaagccgcttcatcgccaaggcggcccccgtggcctcggaggaggaggccttggcgtttttggccgagaaccgggagcctgaggccacccacaacggccacgcctacaagatcggcctcctctaccgcttctctgacgacggggagccctcgggcaccgcaggcaggcccatcctccacgccatagaggcccagggcctggaccgggtggcggtcctggtggtgcgctacttcggcggggtgaagctcggggccggggggcttgtgcgggcctacgggggggtggcggcggaggccttaaggcgggcgcccaaggtccccttggtggagcgggtggggctcgccttcctcgtgcccttcgccgaggtgggccgggtctacgccctcctggaggcccgcgcccctgaaggccgaggagacctacaccccggaggcgtgcgcttcgccctcctcctccccaagcccgagcgggaaggtttcctcagggcgctcctggacgccacccggggacaggtggccctggagtagcatggaggcgatgcttccgctctttgaacccaaaggccgggtcctcctggtggacggccaccacctggcctaccgcaccttcttcgccctgaagggcctcaccacgagccggggcgaaccggtgcaggcggtctacggcttcgccaagagcctcctcaaggccctgaaggaggacgggtacaaggccgtcttcgtggtctttgacgccaaggccccctccttccgccacgaggcctacgaggcctacaaggcggggagggccccgacccccgaggacttcccccggcagctcgccctcatcaaggagctggtggacctcctggggtttacccgcctcgaggtccccggctacgaggcggacgacgttctcgccaccctggccaagaaggcggaaaaggaggggtacgaggtgcgcatcctcaccgccgaccgcgacctctaccaactcgtctccgaccgcgtcgccgtcctccaccccgagggccacctcatcaccccggagtggctttgggagaagtacggcctcaggccggagcagtgggtggacttccgcgccctcgtgggggacccctccgacaacctccccggggtcaagggcatcggggagaagaccgccctcaagctcctcaaggagtggggaagcctggaaaacctcctcaagaacctggaccgggtaaagccagaaaacgtccgggagaagatcaaggcccacctggaagacctcaggctctccttggagctctcccgggtgcgcaccgacctccccctggaggtggacctcgcccaggggcgggagcccgaccgggaggggcttagggccttcctggagaggctggagttcggcagcctcctccacgagttcggcctcctggaggcccccgcccccctggaggaggccccctggcccccgccggaaggggccttcgtgggcttcgtcctctcccgccccgagcccatgtgggcggagcttaaagccctggccgcctgcagggacggccgggtgcaccgggcagcagaccccttggcggggctaaaggacctcaaggaggtccggggcctcctcgccaaggacctcgccgtcttggcctcgagggaggggctagacctcgtgcccggggacgaccccatgctcctcgcctacctcctggacccctccaacaccacccccgagggggtggcgcggcgctacgggggggagtggacggaggacgccgcccaccgggccctcctctcggagaggctccatcggaacctccttaagcgcctcgagggggaggagaagctcctttggctctaccacgaggtggaaaagcccctctcccgggtcctggcccacatggaggccaccggggtacggcgggacgtggcctaccttcaggccctttccctggagcttgcggaggagatccgccgcctcgaggaggaggtcttccgcttggcgggccaccccttcaacctcaactcccgggaccagctggaaagggtgctctttgacgagcttaggcttcccgccttggggaagacgcaaaagacaggcaagcgctccaccagcgccgcggtgctggaggccctacgggaggcccaccccatcgtggagaagatcctccagcaccgggagctcaccaagctcaagaacacctacgtggaccccctcccaagcctcgtccacccgaggacgggccgcctccacacccgcttcaaccagacggccacggccacggggaggcttagtagctccggtcccaacctgcagaacatccccgtccgcacccccttgggccagaggatccgccgggccttcgtggccgaggcgggttgggcgttggtggccctggactatagccagatagagctccgcgtcctcgcccacctctccggggacgaaaacctgatcagggtcttccaggaggggaaggacatccacacccagaccgcaagctggatgttcggcgtccccccggaggccgtggaccccctgatgcgccgggcggccaagacggtgaacttcggcgtcctctacggcatgtccgcccataggctctcccaggagcttgccatcccctacgaggaggcggtggcctttatagagcgctacttccaaagcttccccaaggtgcgggcctggatagaaaagaccctggaggaggggaggaagcggggctacgtggaaaccctcttcggaagaaggcgctacgtgcccgacctcaacgcccgggtgaagagcgtcagggaggccgcggagcgcatggccttcaacatgcccgtccagggcaccgccgccgacctcatgaagctcgccatggtgaagctcttcccccgcctccgggagatgggggcccgcatgctcctccaggtccacgacgagctcctcctggaggccccccaagcgcgggccgaggaggtggcggctttggccaaggaggccatggagaaggcctatcccctcgccgtgcccctggaggtggaggtggggatgggggaggactggctttccgccaagggttaggggggccctgccgtttagaggaagttcaaggggttgtccctcagaaacgcctccaggggaacgccctctgggcctaccaggaggcctttagccccaaaggtgcgggtgaaggcttccaggccctggg

SEQ ID NO: 3552 - DNA, 3221 bp, Artificial Sequence
  Description of Artificial Sequence: Synthetic DNA sequence of Thermus thermophilus DNA Polymerase D580H
tctagaggaagcatgagcctcaccctggcagacaaggtggtctacgaggaggagatccagaaaagccgcttcatcgccaaggcggcccccgtggcctcggaggaggaggccttggcgtttttggccgagaaccgggagcctgaggccacccacaacggccacgcctacaagatcggcctcctctaccgcttctctgacgacggggagccctcgggcaccgcaggcaggcccatcctccacgccatagaggcccagggcctggaccgggtggcggtcctggtggtgcgctacttcggcggggtgaagctcggggccggggggcttgtgcgggcctacgggggggtggcggcggaggccttaaggcgggcgcccaaggtccccttggtggagcgggtggggctcgccttcctcgtgcccttcgccgaggtgggccgggtctacgccctcctggaggcccgcgcccctgaaggccgaggagacctacaccccggaggcgtgcgcttcgccctcctcctccccaagcccgagcgggaaggtttcctcagggcgctcctggacgccacccggggacaggtggccctggagtagcatggaggcgatgcttccgctctttgaacccaaaggccgggtcctcctggtggacggccaccacctggcctaccgcaccttcttcgccctgaagggcctcaccacgagccggggcgaaccggtgcaggcggtctacggcttcgccaagagcctcctcaaggccctgaaggaggacgggtacaaggccgtcttcgtggtctttgacgccaaggccccctccttccgccacgaggcctacgaggcctacaaggcggggagggccccgacccccgaggacttcccccggcagctcgccctcatcaaggagctggtggacctcctggggtttacccgcctcgaggtccccggctacgaggcggacgacgttctcgccaccctggccaagaaggcggaaaaggaggggtacgaggtgcgcatcctcaccgccgaccgcgacctctaccaactcgtctccgaccgcgtcgccgtcctccaccccgagggccacctcatcaccccggagtggctttgggagaagtacggcctcaggccggagcagtgggtggacttccgcgccctcgtgggggacccctccgacaacctccccggggtcaagggcatcggggagaagaccgccctcaagctcctcaaggagtggggaagcctggaaaacctcctcaagaacctggaccgggtaaagccagaaaacgtccgggagaagatcaaggcccacctggaagacctcaggctctccttggagctctcccgggtgcgcaccgacctccccctggaggtggacctcgcccaggggcgggagcccgaccgggaggggcttagggccttcctggagaggctggagttcggcagcctcctccacgagttcggcctcctggaggcccccgcccccctggaggaggccccctggcccccgccggaaggggccttcgtgggcttcgtcctctcccgccccgagcccatgtgggcggagcttaaagccctggccgcctgcagggacggccgggtgcaccgggcagcagaccccttggcggggctaaaggacctcaaggaggtccggggcctcctcgccaaggacctcgccgtcttggcctcgagggaggggctagacctcgtgcccggggacgaccccatgctcctcgcctacctcctggacccctccaacaccacccccgagggggtggcgcggcgctacgggggggagtggacggaggacgccgcccaccgggccctcctctcggagaggctccatcggaacctccttaagcgcctcgagggggaggagaagctcctttggctctaccacgaggtggaaaagcccctctcccgggtcctggcccacatggaggccaccggggtacggcgggacgtggcctaccttcaggccctttccctggagcttgcggaggagatccgccgcctcgaggaggaggtcttccgcttggcgggccaccccttcaacctcaactcccgggaccagctggaaagggtgctctttgacgagcttaggcttcccgccttggggaagacgcaaaagacaggcaagcgctccaccagcgccgcggtgctggaggccctacgggaggcccaccccatcgtggagaagatcctccagcaccgggagctcaccaagctcaagaacacctacgtggaccccctcccaagcctcgtccacccgaggacgggccgcctccacacccgcttcaaccagacggccacggccacggggaggcttagtagctcccatcccaacctgcagaacatccccgtccgcacccccttgggccagaggatccgccgggccttcgtggccgaggcgggttgggcgttggtggccctggactatagccagatagagctccgcgtcctcgcccacctctccggggacgaaaacctgatcagggtcttccaggaggggaaggacatccacacccagaccgcaagctggatgttcggcgtccccccggaggccgtggaccccctgatgcgccgggcggccaagacggtgaacttcggcgtcctctacggcatgtccgcccataggctctcccaggagcttgccatcccctacgaggaggcggtggcctttatagagcgctacttccaaagcttccccaaggtgcgggcctggatagaaaagaccctggaggaggggaggaagcggggctacgtggaaaccctcttcggaagaaggcgctacgtgcccgacctcaacgcccgggtgaagagcgtcagggaggccgcggagcgcatggccttcaacatgcccgtccagggcaccgccgccgacctcatgaagctcgccatggtgaagctcttcccccgcctccgggagatgggggcccgcatgctcctccaggtccacgacgagctcctcctggaggccccccaagcgcgggccgaggaggtggcggctttggccaaggaggccatggagaaggcctatcccctcgccgtgcccctggaggtggaggtggggatgggggaggactggctttccgccaagggttaggggggccctgccgtttagaggaagttcaaggggttgtccctcagaaacgcctccaggggaacgccctctgggcctaccaggaggcctttagccccaaaggtgcgggtgaaggcttccaggccctggg

SEQ ID NO: 3553 - DNA, 3221 bp, Artificial Sequence
  Description of Artificial Sequence: Synthetic DNA sequence of Thermus thermophilus DNA Polymerase D580I
tctagaggaagcatgagcctcaccctggcagacaaggtggtctacgaggaggagatccagaaaagccgcttcatcgccaaggcggcccccgtggcctcggaggaggaggccttggcgtttttggccgagaaccgggagcctgaggccacccacaacggccacgcctacaagatcggcctcctctaccgcttctctgacgacggggagccctcgggcaccgcaggcaggcccatcctccacgccatagaggcccagggcctggaccgggtggcggtcctggtggtgcgctacttcggcggggtgaagctcggggccggggggcttgtgcgggcctacgggggggtggcggcggaggccttaaggcgggcgcccaaggtccccttggtggagcgggtggggctcgccttcctcgtgcccttcgccgaggtgggccgggtctacgccctcctggaggcccgcgcccctgaaggccgaggagacctacaccccggaggcgtgcgcttcgccctcctcctccccaagcccgagcgggaaggtttcctcagggcgctcctggacgccacccggggacaggtggccctggagtagcatggaggcgatgcttccgctctttgaacccaaaggccgggtcctcctggtggacggccaccacctggcctaccgcaccttcttcgccctgaagggcctcaccacgagccggggcgaaccggtgcaggcggtctacggcttcgccaagagcctcctcaaggccctgaaggaggacgggtacaaggccgtcttcgtggtctttgacgccaaggccccctccttccgccacgaggcctacgaggcctacaaggcggggagggccccgacccccgaggacttcccccggcagctcgccctcatcaaggagctggtggacctcctggggtttacccgcctcgaggtccccggctacgaggcggacgacgttctcgccaccctggccaagaaggcggaaaaggaggggtacgaggtgcgcatcctcaccgccgaccgcgacctctaccaactcgtctccgaccgcgtcgccgtcctccaccccgagggccacctcatcaccccggagtggctttgggagaagtacggcctcaggccggagcagtgggtggacttccgcgccctcgtgggggacccctccgacaacctccccggggtcaagggcatcggggagaagaccgccctcaagctcctcaaggagtggggaagcctggaaaacctcctcaagaacctggaccgggtaaagccagaaaacgtccgggagaagatcaaggcccacctggaagacctcaggctctccttggagctctcccgggtgcgcaccgacctccccctggaggtggacctcgcccaggggcgggagcccgaccgggaggggcttagggccttcctggagaggctggagttcggcagcctcctccacgagttcggcctcctggaggcccccgcccccctggaggaggccccctggcccccgccggaaggggccttcgtgggcttcgtcctctcccgccccgagcccatgtgggcggagcttaaagccctggccgcctgcagggacggccgggtgcaccgggcagcagaccccttggcggggctaaaggacctcaaggaggtccggggcctcctcgccaaggacctcgccgtcttggcctcgagggaggggctagacctcgtgcccggggacgaccccatgctcctcgcctacctcctggacccctccaacaccacccccgagggggtggcgcggcgctacgggggggagtggacggaggacgccgcccaccgggccctcctctcggagaggctccatcggaacctccttaagcgcctcgagggggaggagaagctcctttggctctaccacgaggtggaaaagcccctctcccgggtcctggcccacatggaggccaccggggtacggcgggacgtggcctaccttcaggccctttccctggagcttgcggaggagatccgccgcctcgaggaggaggtcttccgcttggcgggccaccccttcaacctcaactcccgggaccagctggaaagggtgctctttgacgagcttaggcttcccgccttggggaagacgcaaaagacaggcaagcgctccaccagcgccgcggtgctggaggccctacgggaggcccaccccatcgtggagaagatcctccagcaccgggagctcaccaagctcaagaacacctacgtggaccccctcccaagcctcgtccacccgaggacgggccgcctccacacccgcttcaaccagacggccacggccacggggaggcttagtagctccattcccaacctgcagaacatccccgtccgcacccccttgggccagaggatccgccgggccttcgtggccgaggcgggttgggcgttggtggccctggactatagccagatagagctccgcgtcctcgcccacctctccggggacgaaaacctgatcagggtcttccaggaggggaaggacatccacacccagaccgcaagctggatgttcggcgtccccccggaggccgtggaccccctgatgcgccgggcggccaagacggtgaacttcggcgtcctctacggcatgtccgcccataggctctcccaggagcttgccatcccctacgaggaggcggtggcctttatagagcgctacttccaaagcttccccaaggtgcgggcctggatagaaaagaccctggaggaggggaggaagcggggctacgtggaaaccctcttcggaagaaggcgctacgtgcccgacctcaacgcccgggtgaagagcgtcagggaggccgcggagcgcatggccttcaacatgcccgtccagggcaccgccgccgacctcatgaagctcgccatggtgaagctcttcccccgcctccgggagatgggggcccgcatgctcctccaggtccacgacgagctcctcctggaggccccccaagcgcgggccgaggaggtggcggctttggccaaggaggccatggagaaggcctatcccctcgccgtgcccctggaggtggaggtggggatgggggaggactggctttccgccaagggttaggggggccctgccgtttagaggaagttcaaggggttgtccctcagaaacgcctccaggggaacgccctctgggcctaccaggaggcctttagccccaaaggtgcgggtgaaggcttccaggccctggg

SEQ ID NO: 3554 - DNA, 3221 bp, Artificial Sequence
  Description of Artificial Sequence: Synthetic DNA sequence of Thermus thermophilus DNA Polymerase D580L
tctagaggaagcatgagcctcaccctggcagacaaggtggtctacgaggaggagatccagaaaagccgcttcatcgccaaggcggcccccgtggcctcggaggaggaggccttggcgtttttggccgagaaccgggagcctgaggccacccacaacggccacgcctacaagatcggcctcctctaccgcttctctgacgacggggagccctcgggcaccgcaggcaggcccatcctccacgccatagaggcccagggcctggaccgggtggcggtcctggtggtgcgctacttcggcggggtgaagctcggggccggggggcttgtgcgggcctacgggggggtggcggcggaggccttaaggcgggcgcccaaggtccccttggtggagcgggtggggctcgccttcctcgtgcccttcgccgaggtgggccgggtctacgccctcctggaggcccgcgcccctgaaggccgaggagacctacaccccggaggcgtgcgcttcgccctcctcctccccaagcccgagcgggaaggtttcctcagggcgctcctggacgccacccggggacaggtggccctggagtagcatggaggcgatgcttccgctctttgaacccaaaggccgggtcctcctggtggacggccaccacctggcctaccgcaccttcttcgccctgaagggcctcaccacgagccggggcgaaccggtgcaggcggtctacggcttcgccaagagcctcctcaaggccctgaaggaggacgggtacaaggccgtcttcgtggtctttgacgccaaggccccctccttccgccacgaggcctacgaggcctacaaggcggggagggccccgacccccgaggacttcccccggcagctcgccctcatcaaggagctggtggacctcctggggtttacccgcctcgaggtccccggctacgaggcggacgacgttctcgccaccctggccaagaaggcggaaaaggaggggtacgaggtgcgcatcctcaccgccgaccgcgacctctaccaactcgtctccgaccgcgtcgccgtcctccaccccgagggccacctcatcaccccggagtggctttgggagaagtacggcctcaggccggagcagtgggtggacttccgcgccctcgtgggggacccctccgacaacctccccggggtcaagggcatcggggagaagaccgccctcaagctcctcaaggagtggggaagcctggaaaacctcctcaagaacctggaccgggtaaagccagaaaacgtccgggagaagatcaaggcccacctggaagacctcaggctctccttggagctctcccgggtgcgcaccgacctccccctggaggtggacctcgcccaggggcgggagcccgaccgggaggggcttagggccttcctggagaggctggagttcggcagcctcctccacgagttcggcctcctggaggcccccgcccccctggaggaggccccctggcccccgccggaaggggccttcgtgggcttcgtcctctcccgccccgagcccatgtgggcggagcttaaagccctggccgcctgcagggacggccgggtgcaccgggcagcagaccccttggcggggctaaaggacctcaaggaggtccggggcctcctcgccaaggacctcgccgtcttggcctcgagggaggggctagacctcgtgcccggggacgaccccatgctcctcgcctacctcctggacccctccaacaccacccccgagggggtggcgcggcgctacgggggggagtggacggaggacgccgcccaccgggccctcctctcggagaggctccatcggaacctccttaagcgcctcgagggggaggagaagctcctttggctctaccacgaggtggaaaagcccctctcccgggtcctggcccacatggaggccaccggggtacggcgggacgtggcctaccttcaggccctttccctggagcttgcggaggagatccgccgcctcgaggaggaggtcttccgcttggcgggccaccccttcaacctcaactcccgggaccagctggaaagggtgctctttgacgagcttaggcttcccgccttggggaagacgcaaaagacaggcaagcgctccaccagcgccgcggtgctggaggccctacgggaggcccaccccatcgtggagaagatcctccagcaccgggagctcaccaagctcaagaacacctacgtggaccccctcccaagcctcgtccacccgaggacgggccgcctccacacccgcttcaaccagacggccacggccacggggaggcttagtagctcccttcccaacctgcagaacatccccgtccgcacccccttgggccagaggatccgccgggccttcgtggccgaggcgggttgggcgttggtggccctggactatagccagatagagctccgcgtcctcgcccacctctccggggacgaaaacctgatcagggtcttccaggaggggaaggacatccacacccagaccgcaagctggatgttcggcgtccccccggaggccgtggaccccctgatgcgccgggcggccaagacggtgaacttcggcgtcctctacggcatgtccgcccataggctctcccaggagcttgccatcccctacgaggaggcggtggcctttatagagcgctacttccaaagcttccccaaggtgcgggcctggatagaaaagaccctggaggaggggaggaagcggggctacgtggaaaccctcttcggaagaaggcgctacgtgcccgacctcaacgcccgggtgaagagcgtcagggaggccgcggagcgcatggccttcaacatgcccgtccagggcaccgccgccgacctcatgaagctcgccatggtgaagctcttcccccgcctccgggagatgggggcccgcatgctcctccaggtccacgacgagctcctcctggaggccccccaagcgcgggccgaggaggtggcggctttggccaaggaggccatggagaaggcctatcccctcgccgtgcccctggaggtggaggtggggatgggggaggactggctttccgccaagggttaggggggccctgccgtttagaggaagttcaaggggttgtccctcagaaacgcctccaggggaacgccctctgggcctaccaggaggcctttagccccaaaggtgcgggtgaaggcttccaggccctggg

SEQ ID NO: 3555 - DNA, 3221 bp, Artificial Sequence
  Description of Artificial Sequence: Synthetic DNA sequence of Thermus thermophilus DNA Polymerase D580K
tctagaggaagcatgagcctcaccctggcagacaaggtggtctacgaggaggagatccagaaaagccgcttcatcgccaaggcggcccccgtggcctcggaggaggaggccttggcgtttttggccgagaaccgggagcctgaggccacccacaacggccacgcctacaagatcggcctcctctaccgcttctctgacgacggggagccctcgggcaccgcaggcaggcccatcctccacgccatagaggcccagggcctggaccgggtggcggtcctggtggtgcgctacttcggcggggtgaagctcggggccggggggcttgtgcgggcctacgggggggtggcggcggaggccttaaggcgggcgcccaaggtccccttggtggagcgggtggggctcgccttcctcgtgcccttcgccgaggtgggccgggtctacgccctcctggaggcccgcgcccctgaaggccgaggagacctacaccccggaggcgtgcgcttcgccctcctcctccccaagcccgagcgggaaggtttcctcagggcgctcctggacgccacccggggacaggtggccctggagtagcatggaggcgatgcttccgctctttgaacccaaaggccgggtcctcctggtggacggccaccacctggcctaccgcaccttcttcgccctgaagggcctcaccacgagccggggcgaaccggtgcaggcggtctacggcttcgccaagagcctcctcaaggccctgaaggaggacgggtacaaggccgtcttcgtggtctttgacgccaaggccccctccttccgccacgaggcctacgaggcctacaaggcggggagggccccgacccccgaggacttcccccggcagctcgccctcatcaaggagctggtggacctcctggggtttacccgcctcgaggtccccggctacgaggcggacgacgttctcgccaccctggccaagaaggcggaaaaggaggggtacgaggtgcgcatcctcaccgccgaccgcgacctctaccaactcgtctccgaccgcgtcgccgtcctccaccccgagggccacctcatcaccccggagtggctttgggagaagtacggcctcaggccggagcagtgggtggacttccgcgccctcgtgggggacccctccgacaacctccccggggtcaagggcatcggggagaagaccgccctcaagctcctcaaggagtggggaagcctggaaaacctcctcaagaacctggaccgggtaaagccagaaaacgtccgggagaagatcaaggcccacctggaagacctcaggctctccttggagctctcccgggtgcgcaccgacctccccctggaggtggacctcgcccaggggcgggagcccgaccgggaggggcttagggccttcctggagaggctggagttcggcagcctcctccacgagttcggcctcctggaggcccccgcccccctggaggaggccccctggcccccgccggaaggggccttcgtgggcttcgtcctctcccgccccgagcccatgtgggcggagcttaaagccctggccgcctgcagggacggccgggtgcaccgggcagcagaccccttggcggggctaaaggacctcaaggaggtccggggcctcctcgccaaggacctcgccgtcttggcctcgagggaggggctagacctcgtgcccggggacgaccccatgctcctcgcctacctcctggacccctccaacaccacccccgagggggtggcgcggcgctacgggggggagtggacggaggacgccgcccaccgggccctcctctcggagaggctccatcggaacctccttaagcgcctcgagggggaggagaagctcctttggctctaccacgaggtggaaaagcccctctcccgggtcctggcccacatggaggccaccggggtacggcgggacgtggcctaccttcaggccctttccctggagcttgcggaggagatccgccgcctcgaggaggaggtcttccgcttggcgggccaccccttcaacctcaactcccgggaccagctggaaagggtgctctttgacgagcttaggcttcccgccttggggaagacgcaaaagacaggcaagcgctccaccagcgccgcggtgctggaggccctacgggaggcccaccccatcgtggagaagatcctccagcaccgggagctcaccaagctcaagaacacctacgtggaccccctcccaagcctcgtccacccgaggacgggccgcctccacacccgcttcaaccagacggccacggccacggggaggcttagtagctccaaacccaacctgcagaacatccccgtccgcacccccttgggccagaggatccgccgggccttcgtggccgaggcgggttgggcgttggtggccctggactatagccagatagagctccgcgtcctcgcccacctctccggggacgaaaacctgatcagggtcttccaggaggggaaggacatccacacccagaccgcaagctggatgttcggcgtccccccggaggccgtggaccccctgatgcgccgggcggccaagacggtgaacttcggcgtcctctacggcatgtccgcccataggctctcccaggagcttgccatcccctacgaggaggcggtggcctttatagagcgctacttccaaagcttccccaaggtgcgggcctggatagaaaagaccctggaggaggggaggaagcggggctacgtggaaaccctcttcggaagaaggcgctacgtgcccgacctcaacgcccgggtgaagagcgtcagggaggccgcggagcgcatggccttcaacatgcccgtccagggcaccgccgccgacctcatgaagctcgccatggtgaagctcttcccccgcctccgggagatgggggcccgcatgctcctccaggtccacgacgagctcctcctggaggccccccaagcgcgggccgaggaggtggcggctttggccaaggaggccatggagaaggcctatcccctcgccgtgcccctggaggtggaggtggggatgggggaggactggctttccgccaagggttaggggggccctgccgtttagaggaagttcaaggggttgtccctcagaaacgcctccaggggaacgccctctgggcctaccaggaggcctttagccccaaaggtgcgggtgaaggcttccaggccctggg

SEQ ID NO: 3556 - DNA, 3221 bp, Artificial Sequence
  Description of Artificial Sequence: Synthetic DNA sequence of Thermus thermophilus DNA Polymerase D580M
tctagaggaagcatgagcctcaccctggcagacaaggtggtctacgaggaggagatccagaaaagccgcttcatcgccaaggcggcccccgtggcctcggaggaggaggccttggcgtttttggccgagaaccgggagcctgaggccacccacaacggccacgcctacaagatcggcctcctctaccgcttctctgacgacggggagccctcgggcaccgcaggcaggcccatcctccacgccatagaggcccagggcctggaccgggtggcggtcctggtggtgcgctacttcggcggggtgaagctcggggccggggggcttgtgcgggcctacgggggggtggcggcggaggccttaaggcgggcgcccaaggtccccttggtggagcgggtggggctcgccttcctcgtgcccttcgccgaggtgggccgggtctacgccctcctggaggcccgcgcccctgaaggccgaggagacctacaccccggaggcgtgcgcttcgccctcctcctccccaagcccgagcgggaaggtttcctcagggcgctcctggacgccacccggggacaggtggccctggagtagcatggaggcgatgcttccgctctttgaacccaaaggccgggtcctcctggtggacggccaccacctggcctaccgcaccttcttcgccctgaagggcctcaccacgagccggggcgaaccggtgcaggcggtctacggcttcgccaagagcctcctcaaggccctgaaggaggacgggtacaaggccgtcttcgtggtctttgacgccaaggccccctccttccgccacgaggcctacgaggcctacaaggcggggagggccccgacccccgaggacttcccccggcagctcgccctcatcaaggagctggtggacctcctggggtttacccgcctcgaggtccccggctacgaggcggacgacgttctcgccaccctggccaagaaggcggaaaaggaggggtacgaggtgcgcatcctcaccgccgaccgcgacctctaccaactcgtctccgaccgcgtcgccgtcctccaccccgagggccacctcatcaccccggagtggctttgggagaagtacggcctcaggccggagcagtgggtggacttccgcgccctcgtgggggacccctccgacaacctccccggggtcaagggcatcggggagaagaccgccctcaagctcctcaaggagtggggaagcctggaaaacctcctcaagaacctggaccgggtaaagccagaaaacgtccgggagaagatcaaggcccacctggaagacctcaggctctccttggagctctcccgggtgcgcaccgacctccccctggaggtggacctcgcccaggggcgggagcccgaccgggaggggcttagggccttcctggagaggctggagttcggcagcctcctccacgagttcggcctcctggaggcccccgcccccctggaggaggccccctggcccccgccggaaggggccttcgtgggcttcgtcctctcccgccccgagcccatgtgggcggagcttaaagccctggccgcctgcagggacggccgggtgcaccgggcagcagaccccttggcggggctaaaggacctcaaggaggtccggggcctcctcgccaaggacctcgccgtcttggcctcgagggaggggctagacctcgtgcccggggacgaccccatgctcctcgcctacctcctggacccctccaacaccacccccgagggggtggcgcggcgctacgggggggagtggacggaggacgccgcccaccgggccctcctctcggagaggctccatcggaacctccttaagcgcctcgagggggaggagaagctcctttggctctaccacgaggtggaaaagcccctctcccgggtcctggcccacatggaggccaccggggtacggcgggacgtggcctaccttcaggccctttccctggagcttgcggaggagatccgccgcctcgaggaggaggtcttccgcttggcgggccaccccttcaacctcaactcccgggaccagctggaaagggtgctctttgacgagcttaggcttcccgccttggggaagacgcaaaagacaggcaagcgctccaccagcgccgcggtgctggaggccctacgggaggcccaccccatcgtggagaagatcctccagcaccgggagctcaccaagctcaagaacacctacgtggaccccctcccaagcctcgtccacccgaggacgggccgcctccacacccgcttcaaccagacggccacggccacggggaggcttagtagctccatgcccaacctgcagaacatccccgtccgcacccccttgggccagaggatccgccgggccttcgtggccgaggcgggttgggcgttggtggccctggactatagccagatagagctccgcgtcctcgcccacctctccggggacgaaaacctgatcagggtcttccaggaggggaaggacatccacacccagaccgcaagctggatgttcggcgtccccccggaggccgtggaccccctgatgcgccgggcggccaagacggtgaacttcggcgtcctctacggcatgtccgcccataggctctcccaggagcttgccatcccctacgaggaggcggtggcctttatagagcgctacttccaaagcttccccaaggtgcgggcctggatagaaaagaccctggaggaggggaggaagcggggctacgtggaaaccctcttcggaagaaggcgctacgtgcccgacctcaacgcccgggtgaagagcgtcagggaggccgcggagcgcatggccttcaacatgcccgtccagggcaccgccgccgacctcatgaagctcgccatggtgaagctcttcccccgcctccgggagatgggggcccgcatgctcctccaggtccacgacgagctcctcctggaggccccccaagcgcgggccgaggaggtggcggctttggccaaggaggccatggagaaggcctatcccctcgccgtgcccctggaggtggaggtggggatgggggaggactggctttccgccaagggttaggggggccctgccgtttagaggaagttcaaggggttgtccctcagaaacgcctccaggggaacgccctctgggcctaccaggaggcctttagccccaaaggtgcgggtgaaggcttccaggccctggg

SEQ ID NO: 3557 - DNA, 3221 bp, Artificial Sequence
  Description of Artificial Sequence: Synthetic DNA sequence of Thermus thermophilus DNA Polymerase D580F
tctagaggaagcatgagcctcaccctggcagacaaggtggtctacgaggaggagatccagaaaagccgcttcatcgccaaggcggcccccgtggcctcggaggaggaggccttggcgtttttggccgagaaccgggagcctgaggccacccacaacggccacgcctacaagatcggcctcctctaccgcttctctgacgacggggagccctcgggcaccgcaggcaggcccatcctccacgccatagaggcccagggcctggaccgggtggcggtcctggtggtgcgctacttcggcggggtgaagctcggggccggggggcttgtgcgggcctacgggggggtggcggcggaggccttaaggcgggcgcccaaggtccccttggtggagcgggtggggctcgccttcctcgtgcccttcgccgaggtgggccgggtctacgccctcctggaggcccgcgcccctgaaggccgaggagacctacaccccggaggcgtgcgcttcgccctcctcctccccaagcccgagcgggaaggtttcctcagggcgctcctggacgccacccggggacaggtggccctggagtagcatggaggcgatgcttccgctctttgaacccaaaggccgggtcctcctggtggacggccaccacctggcctaccgcaccttcttcgccctgaagggcctcaccacgagccggggcgaaccggtgcaggcggtctacggcttcgccaagagcctcctcaaggccctgaaggaggacgggtacaaggccgtcttcgtggtctttgacgccaaggccccctccttccgccacgaggcctacgaggcctacaaggcggggagggccccgacccccgaggacttcccccggcagctcgccctcatcaaggagctggtggacctcctggggtttacccgcctcgaggtccccggctacgaggcggacgacgttctcgccaccctggccaagaaggcggaaaaggaggggtacgaggtgcgcatcctcaccgccgaccgcgacctctaccaactcgtctccgaccgcgtcgccgtcctccaccccgagggccacctcatcaccccggagtggctttgggagaagtacggcctcaggccggagcagtgggtggacttccgcgccctcgtgggggacccctccgacaacctccccggggtcaagggcatcggggagaagaccgccctcaagctcctcaaggagtggggaagcctggaaaacctcctcaagaacctggaccgggtaaagccagaaaacgtccgggagaagatcaaggcccacctggaagacctcaggctctccttggagctctcccgggtgcgcaccgacctccccctggaggtggacctcgcccaggggcgggagcccgaccgggaggggcttagggccttcctggagaggctggagttcggcagcctcctccacgagttcggcctcctggaggcccccgcccccctggaggaggccccctggcccccgccggaaggggccttcgtgggcttcgtcctctcccgccccgagcccatgtgggcggagcttaaagccctggccgcctgcagggacggccgggtgcaccgggcagcagaccccttggcggggctaaaggacctcaaggaggtccggggcctcctcgccaaggacctcgccgtcttggcctcgagggaggggctagacctcgtgcccggggacgaccccatgctcctcgcctacctcctggacccctccaacaccacccccgagggggtggcgcggcgctacgggggggagtggacggaggacgccgcccaccgggccctcctctcggagaggctccatcggaacctccttaagcgcctcgagggggaggagaagctcctttggctctaccacgaggtggaaaagcccctctcccgggtcctggcccacatggaggccaccggggtacggcgggacgtggcctaccttcaggccctttccctggagcttgcggaggagatccgccgcctcgaggaggaggtcttccgcttggcgggccaccccttcaacctcaactcccgggaccagctggaaagggtgctctttgacgagcttaggcttcccgccttggggaagacgcaaaagacaggcaagcgctccaccagcgccgcggtgctggaggccctacgggaggcccaccccatcgtggagaagatcctccagcaccgggagctcaccaagctcaagaacacctacgtggaccccctcccaagcctcgtccacccgaggacgggccgcctccacacccgcttcaaccagacggccacggccacggggaggcttagtagctcctttcccaacctgcagaacatccccgtccgcacccccttgggccagaggatccgccgggccttcgtggccgaggcgggttgggcgttggtggccctggactatagccagatagagctccgcgtcctcgcccacctctccggggacgaaaacctgatcagggtcttccaggaggggaaggacatccacacccagaccgcaagctggatgttcggcgtccccccggaggccgtggaccccctgatgcgccgggcggccaagacggtgaacttcggcgtcctctacggcatgtccgcccataggctctcccaggagcttgccatcccctacgaggaggcggtggcctttatagagcgctacttccaaagcttccccaaggtgcgggcctggatagaaaagaccctggaggaggggaggaagcggggctacgtggaaaccctcttcggaagaaggcgctacgtgcccgacctcaacgcccgggtgaagagcgtcagggaggccgcggagcgcatggccttcaacatgcccgtccagggcaccgccgccgacctcatgaagctcgccatggtgaagctcttcccccgcctccgggagatgggggcccgcatgctcctccaggtccacgacgagctcctcctggaggccccccaagcgcgggccgaggaggtggcggctttggccaaggaggccatggagaaggcctatcccctcgccgtgcccctggaggtggaggtggggatgggggaggactggctttccgccaagggttaggggggccctgccgtttagaggaagttcaaggggttgtccctcagaaacgcctccaggggaacgccctctgggcctaccaggaggcctttagccccaaaggtgcgggtgaaggcttccaggccctggg

SEQ ID NO: 3558 - DNA, 3221 bp, Artificial Sequence
  Description of Artificial Sequence: Synthetic DNA sequence of Thermus thermophilus DNA Polymerase D580P
tctagaggaagcatgagcctcaccctggcagacaaggtggtctacgaggaggagatccagaaaagccgcttcatcgccaaggcggcccccgtggcctcggaggaggaggccttggcgtttttggccgagaaccgggagcctgaggccacccacaacggccacgcctacaagatcggcctcctctaccgcttctctgacgacggggagccctcgggcaccgcaggcaggcccatcctccacgccatagaggcccagggcctggaccgggtggcggtcctggtggtgcgctacttcggcggggtgaagctcggggccggggggcttgtgcgggcctacgggggggtggcggcggaggccttaaggcgggcgcccaaggtccccttggtggagcgggtggggctcgccttcctcgtgcccttcgccgaggtgggccgggtctacgccctcctggaggcccgcgcccctgaaggccgaggagacctacaccccggaggcgtgcgcttcgccctcctcctccccaagcccgagcgggaaggtttcctcagggcgctcctggacgccacccggggacaggtggccctggagtagcatggaggcgatgcttccgctctttgaacccaaaggccgggtcctcctggtggacggccaccacctggcctaccgcaccttcttcgccctgaagggcctcaccacgagccggggcgaaccggtgcaggcggtctacggcttcgccaagagcctcctcaaggccctgaaggaggacgggtacaaggccgtcttcgtggtctttgacgccaaggccccctccttccgccacgaggcctacgaggcctacaaggcggggagggccccgacccccgaggacttcccccggcagctcgccctcatcaaggagctggtggacctcctggggtttacccgcctcgaggtccccggctacgaggcggacgacgttctcgccaccctggccaagaaggcggaaaaggaggggtacgaggtgcgcatcctcaccgccgaccgcgacctctaccaactcgtctccgaccgcgtcgccgtcctccaccccgagggccacctcatcaccccggagtggctttgggagaagtacggcctcaggccggagcagtgggtggacttccgcgccctcgtgggggacccctccgacaacctccccggggtcaagggcatcggggagaagaccgccctcaagctcctcaaggagtggggaagcctggaaaacctcctcaagaacctggaccgggtaaagccagaaaacgtccgggagaagatcaaggcccacctggaagacctcaggctctccttggagctctcccgggtgcgcaccgacctccccctggaggtggacctcgcccaggggcgggagcccgaccgggaggggcttagggccttcctggagaggctggagttcggcagcctcctccacgagttcggcctcctggaggcccccgcccccctggaggaggccccctggcccccgccggaaggggccttcgtgggcttcgtcctctcccgccccgagcccatgtgggcggagcttaaagccctggccgcctgcagggacggccgggtgcaccgggcagcagaccccttggcggggctaaaggacctcaaggaggtccggggcctcctcgccaaggacctcgccgtcttggcctcgagggaggggctagacctcgtgcccggggacgaccccatgctcctcgcctacctcctggacccctccaacaccacccccgagggggtggcgcggcgctacgggggggagtggacggaggacgccgcccaccgggccctcctctcggagaggctccatcggaacctccttaagcgcctcgagggggaggagaagctcctttggctctaccacgaggtggaaaagcccctctcccgggtcctggcccacatggaggccaccggggtacggcgggacgtggcctaccttcaggccctttccctggagcttgcggaggagatccgccgcctcgaggaggaggtcttccgcttggcgggccaccccttcaacctcaactcccgggaccagctggaaagggtgctctttgacgagcttaggcttcccgccttggggaagacgcaaaagacaggcaagcgctccaccagcgccgcggtgctggaggccctacgggaggcccaccccatcgtggagaagatcctccagcaccgggagctcaccaagctcaagaacacctacgtggaccccctcccaagcctcgtccacccgaggacgggccgcctccacacccgcttcaaccagacggccacggccacggggaggcttagtagctcccctcccaacctgcagaacatccccgtccgcacccccttgggccagaggatccgccgggccttcgtggccgaggcgggttgggcgttggtggccctggactatagccagatagagctccgcgtcctcgcccacctctccggggacgaaaacctgatcagggtcttccaggaggggaaggacatccacacccagaccgcaagctggatgttcggcgtccccccggaggccgtggaccccctgatgcgccgggcggccaagacggtgaacttcggcgtcctctacggcatgtccgcccataggctctcccaggagcttgccatcccctacgaggaggcggtggcctttatagagcgctacttccaaagcttccccaaggtgcgggcctggatagaaaagaccctggaggaggggaggaagcggggctacgtggaaaccctcttcggaagaaggcgctacgtgcccgacctcaacgcccgggtgaagagcgtcagggaggccgcggagcgcatggccttcaacatgcccgtccagggcaccgccgccgacctcatgaagctcgccatggtgaagctcttcccccgcctccgggagatgggggcccgcatgctcctccaggtccacgacgagctcctcctggaggccccccaagcgcgggccgaggaggtggcggctttggccaaggaggccatggagaaggcctatcccctcgccgtgcccctggaggtggaggtggggatgggggaggactggctttccgccaagggttaggggggccctgccgtttagaggaagttcaaggggttgtccctcagaaacgcctccaggggaacgccctctgggcctaccaggaggcctttagccccaaaggtgcgggtgaaggcttccaggccctggg

SEQ ID NO: 3559 - DNA, 3221 bp, Artificial Sequence
  Description of Artificial Sequence: Synthetic DNA sequence of Thermus thermophilus DNA Polymerase D580S
tctagaggaagcatgagcctcaccctggcagacaaggtggtctacgaggaggagatccagaaaagccgcttcatcgccaaggcggcccccgtggcctcggaggaggaggccttggcgtttttggccgagaaccgggagcctgaggccacccacaacggccacgcctacaagatcggcctcctctaccgcttctctgacgacggggagccctcgggcaccgcaggcaggcccatcctccacgccatagaggcccagggcctggaccgggtggcggtcctggtggtgcgctacttcggcggggtgaagctcggggccggggggcttgtgcgggcctacgggggggtggcggcggaggccttaaggcgggcgcccaaggtccccttggtggagcgggtggggctcgccttcctcgtgcccttcgccgaggtgggccgggtctacgccctcctggaggcccgcgcccctgaaggccgaggagacctacaccccggaggcgtgcgcttcgccctcctcctccccaagcccgagcgggaaggtttcctcagggcgctcctggacgccacccggggacaggtggccctggagtagcatggaggcgatgcttccgctctttgaacccaaaggccgggtcctcctggtggacggccaccacctggcctaccgcaccttcttcgccctgaagggcctcaccacgagccggggcgaaccggtgcaggcggtctacggcttcgccaagagcctcctcaaggccctgaaggaggacgggtacaaggccgtcttcgtggtctttgacgccaaggccccctccttccgccacgaggcctacgaggcctacaaggcggggagggccccgacccccgaggacttcccccggcagctcgccctcatcaaggagctggtggacctcctggggtttacccgcctcgaggtccccggctacgaggcggacgacgttctcgccaccctggccaagaaggcggaaaaggaggggtacgaggtgcgcatcctcaccgccgaccgcgacctctaccaactcgtctccgaccgcgtcgccgtcctccaccccgagggccacctcatcaccccggagtggctttgggagaagtacggcctcaggccggagcagtgggtggacttccgcgccctcgtgggggacccctccgacaacctccccggggtcaagggcatcggggagaagaccgccctcaagctcctcaaggagtggggaagcctggaaaacctcctcaagaacctggaccgggtaaagccagaaaacgtccgggagaagatcaaggcccacctggaagacctcaggctctccttggagctctcccgggtgcgcaccgacctccccctggaggtggacctcgcccaggggcgggagcccgaccgggaggggcttagggccttcctggagaggctggagttcggcagcctcctccacgagttcggcctcctggaggcccccgcccccctggaggaggccccctggcccccgccggaaggggccttcgtgggcttcgtcctctcccgccccgagcccatgtgggcggagcttaaagccctggccgcctgcagggacggccgggtgcaccgggcagcagaccccttggcggggctaaaggacctcaaggaggtccggggcctcctcgccaaggacctcgccgtcttggcctcgagggaggggctagacctcgtgcccggggacgaccccatgctcctcgcctacctcctggacccctccaacaccacccccgagggggtggcgcggcgctacgggggggagtggacggaggacgccgcccaccgggccctcctctcggagaggctccatcggaacctccttaagcgcctcgagggggaggagaagctcctttggctctaccacgaggtggaaaagcccctctcccgggtcctggcccacatggaggccaccggggtacggcgggacgtggcctaccttcaggccctttccctggagcttgcggaggagatccgccgcctcgaggaggaggtcttccgcttggcgggccaccccttcaacctcaactcccgggaccagctggaaagggtgctctttgacgagcttaggcttcccgccttggggaagacgcaaaagacaggcaagcgctccaccagcgccgcggtgctggaggccctacgggaggcccaccccatcgtggagaagatcctccagcaccgggagctcaccaagctcaagaacacctacgtggaccccctcccaagcctcgtccacccgaggacgggccgcctccacacccgcttcaaccagacggccacggccacggggaggcttagtagctcctctcccaacctgcagaacatccccgtccgcacccccttgggccagaggatccgccgggccttcgtggccgaggcgggttgggcgttggtggccctggactatagccagatagagctccgcgtcctcgcccacctctccggggacgaaaacctgatcagggtcttccaggaggggaaggacatccacacccagaccgcaagctggatgttcggcgtccccccggaggccgtggaccccctgatgcgccgggcggccaagacggtgaacttcggcgtcctctacggcatgtccgcccataggctctcccaggagcttgccatcccctacgaggaggcggtggcctttatagagcgctacttccaaagcttccccaaggtgcgggcctggatagaaaagaccctggaggaggggaggaagcggggctacgtggaaaccctcttcggaagaaggcgctacgtgcccgacctcaacgcccgggtgaagagcgtcagggaggccgcggagcgcatggccttcaacatgcccgtccagggcaccgccgccgacctcatgaagctcgccatggtgaagctcttcccccgcctccgggagatgggggcccgcatgctcctccaggtccacgacgagctcctcctggaggccccccaagcgcgggccgaggaggtggcggctttggccaaggaggccatggagaaggcctatcccctcgccgtgcccctggaggtggaggtggggatgggggaggactggctttccgccaagggttaggggggccctgccgtttagaggaagttcaaggggttgtccctcagaaacgcctccaggggaacgccctctgggcctaccaggaggcctttagccccaaaggtgcgggtgaaggcttccaggccctggg

SEQ ID NO: 3560 - DNA, 3221 bp, Artificial Sequence
  Description of Artificial Sequence: Synthetic DNA sequence of Thermus thermophilus DNA Polymerase D580T
tctagaggaagcatgagcctcaccctggcagacaaggtggtctacgaggaggagatccagaaaagccgcttcatcgccaaggcggcccccgtggcctcggaggaggaggccttggcgtttttggccgagaaccgggagcctgaggccacccacaacggccacgcctacaagatcggcctcctctaccgcttctctgacgacggggagccctcgggcaccgcaggcaggcccatcctccacgccatagaggcccagggcctggaccgggtggcggtcctggtggtgcgctacttcggcggggtgaagctcggggccggggggcttgtgcgggcctacgggggggtggcggcggaggccttaaggcgggcgcccaaggtccccttggtggagcgggtggggctcgccttcctcgtgcccttcgccgaggtgggccgggtctacgccctcctggaggcccgcgcccctgaaggccgaggagacctacaccccggaggcgtgcgcttcgccctcctcctccccaagcccgagcgggaaggtttcctcagggcgctcctggacgccacccggggacaggtggccctggagtagcatggaggcgatgcttccgctctttgaacccaaaggccgggtcctcctggtggacggccaccacctggcctaccgcaccttcttcgccctgaagggcctcaccacgagccggggcgaaccggtgcaggcggtctacggcttcgccaagagcctcctcaaggccctgaaggaggacgggtacaaggccgtcttcgtggtctttgacgccaaggccccctccttccgccacgaggcctacgaggcctacaaggcggggagggccccgacccccgaggacttcccccggcagctcgccctcatcaaggagctggtggacctcctggggtttacccgcctcgaggtccccggctacgaggcggacgacgttctcgccaccctggccaagaaggcggaaaaggaggggtacgaggtgcgcatcctcaccgccgaccgcgacctctaccaactcgtctccgaccgcgtcgccgtcctccaccccgagggccacctcatcaccccggagtggctttgggagaagtacggcctcaggccggagcagtgggtggacttccgcgccctcgtgggggacccctccgacaacctccccggggtcaagggcatcggggagaagaccgccctcaagctcctcaaggagtggggaagcctggaaaacctcctcaagaacctggaccgggtaaagccagaaaacgtccgggagaagatcaaggcccacctggaagacctcaggctctccttggagctctcccgggtgcgcaccgacctccccctggaggtggacctcgcccaggggcgggagcccgaccgggaggggcttagggccttcctggagaggctggagttcggcagcctcctccacgagttcggcctcctggaggcccccgcccccctggaggaggccccctggcccccgccggaaggggccttcgtgggcttcgtcctctcccgccccgagcccatgtgggcggagcttaaagccctggccgcctgcagggacggccgggtgcaccgggcagcagaccccttggcggggctaaaggacctcaaggaggtccggggcctcctcgccaaggacctcgccgtcttggcctcgagggaggggctagacctcgtgcccggggacgaccccatgctcctcgcctacctcctggacccctccaacaccacccccgagggggtggcgcggcgctacgggggggagtggacggaggacgccgcccaccgggccctcctctcggagaggctccatcggaacctccttaagcgcctcgagggggaggagaagctcctttggctctaccacgaggtggaaaagcccctctcccgggtcctggcccacatggaggccaccggggtacggcgggacgtggcctaccttcaggccctttccctggagcttgcggaggagatccgccgcctcgaggaggaggtcttccgcttggcgggccaccccttcaacctcaactcccgggaccagctggaaagggtgctctttgacgagcttaggcttcccgccttggggaagacgcaaaagacaggcaagcgctccaccagcgccgcggtgctggaggccctacgggaggcccaccccatcgtggagaagatcctccagcaccgggagctcaccaagctcaagaacacctacgtggaccccctcccaagcctcgtccacccgaggacgggccgcctccacacccgcttcaaccagacggccacggccacggggaggcttagtagctccactcccaacctgcagaacatccccgtccgcacccccttgggccagaggatccgccgggccttcgtggccgaggcgggttgggcgttggtggccctggactatagccagatagagctccgcgtcctcgcccacctctccggggacgaaaacctgatcagggtcttccaggaggggaaggacatccacacccagaccgcaagctggatgttcggcgtccccccggaggccgtggaccccctgatgcgccgggcggccaagacggtgaacttcggcgtcctctacggcatgtccgcccataggctctcccaggagcttgccatcccctacgaggaggcggtggcctttatagagcgctacttccaaagcttccccaaggtgcgggcctggatagaaaagaccctggaggaggggaggaagcggggctacgtggaaaccctcttcggaagaaggcgctacgtgcccgacctcaacgcccgggtgaagagcgtcagggaggccgcggagcgcatggccttcaacatgcccgtccagggcaccgccgccgacctcatgaagctcgccatggtgaagctcttcccccgcctccgggagatgggggcccgcatgctcctccaggtccacgacgagctcctcctggaggccccccaagcgcgggccgaggaggtggcggctttggccaaggaggccatggagaaggcctatcccctcgccgtgcccctggaggtggaggtggggatgggggaggactggctttccgccaagggttaggggggccctgccgtttagaggaagttcaaggggttgtccctcagaaacgcctccaggggaacgccctctgggcctaccaggaggcctttagccccaaaggtgcgggtgaaggcttccaggccctggg

SEQ ID NO: 3561 - DNA, 3221 bp, Artificial Sequence
  Description of Artificial Sequence: Synthetic DNA sequence of Thermus thermophilus DNA Polymerase D580W
tctagaggaagcatgagcctcaccctggcagacaaggtggtctacgaggaggagatccagaaaagccgcttcatcgccaaggcggcccccgtggcctcggaggaggaggccttggcgtttttggccgagaaccgggagcctgaggccacccacaacggccacgcctacaagatcggcctcctctaccgcttctctgacgacggggagccctcgggcaccgcaggcaggcccatcctccacgccatagaggcccagggcctggaccgggtggcggtcctggtggtgcgctacttcggcggggtgaagctcggggccggggggcttgtgcgggcctacgggggggtggcggcggaggccttaaggcgggcgcccaaggtccccttggtggagcgggtggggctcgccttcctcgtgcccttcgccgaggtgggccgggtctacgccctcctggaggcccgcgcccctgaaggccgaggagacctacaccccggaggcgtgcgcttcgccctcctcctccccaagcccgagcgggaaggtttcctcagggcgctcctggacgccacccggggacaggtggccctggagtagcatggaggcgatgcttccgctctttgaacccaaaggccgggtcctcctggtggacggccaccacctggcctaccgcaccttcttcgccctgaagggcctcaccacgagccggggcgaaccggtgcaggcggtctacggcttcgccaagagcctcctcaaggccctgaaggaggacgggtacaaggccgtcttcgtggtctttgacgccaaggccccctccttccgccacgaggcctacgaggcctacaaggcggggagggccccgacccccgaggacttcccccggcagctcgccctcatcaaggagctggtggacctcctggggtttacccgcctcgaggtccccggctacgaggcggacgacgttctcgccaccctggccaagaaggcggaaaaggaggggtacgaggtgcgcatcctcaccgccgaccgcgacctctaccaactcgtctccgaccgcgtcgccgtcctccaccccgagggccacctcatcaccccggagtggctttgggagaagtacggcctcaggccggagcagtgggtggacttccgcgccctcgtgggggacccctccgacaacctccccggggtcaagggcatcggggagaagaccgccctcaagctcctcaaggagtggggaagcctggaaaacctcctcaagaacctggaccgggtaaagccagaaaacgtccgggagaagatcaaggcccacctggaagacctcaggctctccttggagctctcccgggtgcgcaccgacctccccctggaggtggacctcgcccaggggcgggagcccgaccgggaggggcttagggccttcctggagaggctggagttcggcagcctcctccacgagttcggcctcctggaggcccccgcccccctggaggaggccccctggcccccgccggaaggggccttcgtgggcttcgtcctctcccgccccgagcccatgtgggcggagcttaaagccctggccgcctgcagggacggccgggtgcaccgggcagcagaccccttggcggggctaaaggacctcaaggaggtccggggcctcctcgccaaggacctcgccgtcttggcctcgagggaggggctagacctcgtgcccggggacgaccccatgctcctcgcctacctcctggacccctccaacaccacccccgagggggtggcgcggcgctacgggggggagtggacggaggacgccgcccaccgggccctcctctcggagaggctccatcggaacctccttaagcgcctcgagggggaggagaagctcctttggctctaccacgaggtggaaaagcccctctcccgggtcctggcccacatggaggccaccggggtacggcgggacgtggcctaccttcaggccctttccctggagcttgcggaggagatccgccgcctcgaggaggaggtcttccgcttggcgggccaccccttcaacctcaactcccgggaccagctggaaagggtgctctttgacgagcttaggcttcccgccttggggaagacgcaaaagacaggcaagcgctccaccagcgccgcggtgctggaggccctacgggaggcccaccccatcgtggagaagatcctccagcaccgggagctcaccaagctcaagaacacctacgtggaccccctcccaagcctcgtccacccgaggacgggccgcctccacacccgcttcaaccagacggccacggccacggggaggcttagtagctcctggcccaacctgcagaacatccccgtccgcacccccttgggccagaggatccgccgggccttcgtggccgaggcgggttgggcgttggtggccctggactatagccagatagagctccgcgtcctcgcccacctctccggggacgaaaacctgatcagggtcttccaggaggggaaggacatccacacccagaccgcaagctggatgttcggcgtccccccggaggccgtggaccccctgatgcgccgggcggccaagacggtgaacttcggcgtcctctacggcatgtccgcccataggctctcccaggagcttgccatcccctacgaggaggcggtggcctttatagagcgctacttccaaagcttccccaaggtgcgggcctggatagaaaagaccctggaggaggggaggaagcggggctacgtggaaaccctcttcggaagaaggcgctacgtgcccgacctcaacgcccgggtgaagagcgtcagggaggccgcggagcgcatggccttcaacatgcccgtccagggcaccgccgccgacctcatgaagctcgccatggtgaagctcttcccccgcctccgggagatgggggcccgcatgctcctccaggtccacgacgagctcctcctggaggccccccaagcgcgggccgaggaggtggcggctttggccaaggaggccatggagaaggcctatcccctcgccgtgcccctggaggtggaggtggggatgggggaggactggctttccgccaagggttaggggggccctgccgtttagaggaagttcaaggggttgtccctcagaaacgcctccaggggaacgccctctgggcctaccaggaggcctttagccccaaaggtgcgggtgaaggcttccaggccctggg

SEQ ID NO: 3562 - DNA, 3221 bp, Artificial Sequence
  Description of Artificial Sequence: Synthetic DNA sequence of Thermus thermophilus DNA Polymerase D580Y
tctagaggaagcatgagcctcaccctggcagacaaggtggtctacgaggaggagatccagaaaagccgcttcatcgccaaggcggcccccgtggcctcggaggaggaggccttggcgtttttggccgagaaccgggagcctgaggccacccacaacggccacgcctacaagatcggcctcctctaccgcttctctgacgacggggagccctcgggcaccgcaggcaggcccatcctccacgccatagaggcccagggcctggaccgggtggcggtcctggtggtgcgctacttcggcggggtgaagctcggggccggggggcttgtgcgggcctacgggggggtggcggcggaggccttaaggcgggcgcccaaggtccccttggtggagcgggtggggctcgccttcctcgtgcccttcgccgaggtgggccgggtctacgccctcctggaggcccgcgcccctgaaggccgaggagacctacaccccggaggcgtgcgcttcgccctcctcctccccaagcccgagcgggaaggtttcctcagggcgctcctggacgccacccggggacaggtggccctggagtagcatggaggcgatgcttccgctctttgaacccaaaggccgggtcctcctggtggacggccaccacctggcctaccgcaccttcttcgccctgaagggcctcaccacgagccggggcgaaccggtgcaggcggtctacggcttcgccaagagcctcctcaaggccctgaaggaggacgggtacaaggccgtcttcgtggtctttgacgccaaggccccctccttccgccacgaggcctacgaggcctacaaggcggggagggccccgacccccgaggacttcccccggcagctcgccctcatcaaggagctggtggacctcctggggtttacccgcctcgaggtccccggctacgaggcggacgacgttctcgccaccctggccaagaaggcggaaaaggaggggtacgaggtgcgcatcctcaccgccgaccgcgacctctaccaactcgtctccgaccgcgtcgccgtcctccaccccgagggccacctcatcaccccggagtggctttgggagaagtacggcctcaggccggagcagtgggtggacttccgcgccctcgtgggggacccctccgacaacctccccggggtcaagggcatcggggagaagaccgccctcaagctcctcaaggagtggggaagcctggaaaacctcctcaagaacctggaccgggtaaagccagaaaacgtccgggagaagatcaaggcccacctggaagacctcaggctctccttggagctctcccgggtgcgcaccgacctccccctggaggtggacctcgcccaggggcgggagcccgaccgggaggggcttagggccttcctggagaggctggagttcggcagcctcctccacgagttcggcctcctggaggcccccgcccccctggaggaggccccctggcccccgccggaaggggccttcgtgggcttcgtcctctcccgccccgagcccatgtgggcggagcttaaagccctggccgcctgcagggacggccgggtgcaccgggcagcagaccccttggcggggctaaaggacctcaaggaggtccggggcctcctcgccaaggacctcgccgtcttggcctcgagggaggggctagacctcgtgcccggggacgaccccatgctcctcgcctacctcctggacccctccaacaccacccccgagggggtggcgcggcgctacgggggggagtggacggaggacgccgcccaccgggccctcctctcggagaggctccatcggaacctccttaagcgcctcgagggggaggagaagctcctttggctctaccacgaggtggaaaagcccctctcccgggtcctggcccacatggaggccaccggggtacggcgggacgtggcctaccttcaggccctttccctggagcttgcggaggagatccgccgcctcgaggaggaggtcttccgcttggcgggccaccccttcaacctcaactcccgggaccagctggaaagggtgctctttgacgagcttaggcttcccgccttggggaagacgcaaaagacaggcaagcgctccaccagcgccgcggtgctggaggccctacgggaggcccaccccatcgtggagaagatcctccagcaccgggagctcaccaagctcaagaacacctacgtggaccccctcccaagcctcgtccacccgaggacgggccgcctccacacccgcttcaaccagacggccacggccacggggaggcttagtagctcctatcccaacctgcagaacatccccgtccgcacccccttgggccagaggatccgccgggccttcgtggccgaggcgggttgggcgttggtggccctggactatagccagatagagctccgcgtcctcgcccacctctccggggacgaaaacctgatcagggtcttccaggaggggaaggacatccacacccagaccgcaagctggatgttcggcgtccccccggaggccgtggaccccctgatgcgccgggcggccaagacggtgaacttcggcgtcctctacggcatgtccgcccataggctctcccaggagcttgccatcccctacgaggaggcggtggcctttatagagcgctacttccaaagcttccccaaggtgcgggcctggatagaaaagaccctggaggaggggaggaagcggggctacgtggaaaccctcttcggaagaaggcgctacgtgcccgacctcaacgcccgggtgaagagcgtcagggaggccgcggagcgcatggccttcaacatgcccgtccagggcaccgccgccgacctcatgaagctcgccatggtgaagctcttcccccgcctccgggagatgggggcccgcatgctcctccaggtccacgacgagctcctcctggaggccccccaagcgcgggccgaggaggtggcggctttggccaaggaggccatggagaaggcctatcccctcgccgtgcccctggaggtggaggtggggatgggggaggactggctttccgccaagggttaggggggccctgccgtttagaggaagttcaaggggttgtccctcagaaacgcctccaggggaacgccctctgggcctaccaggaggcctttagccccaaaggtgcgggtgaaggcttccaggccctggg

SEQ ID NO: 3563 - DNA, 3221 bp, Artificial Sequence
  Description of Artificial Sequence: Synthetic DNA sequence of Thermus thermophilus DNA Polymerase D580V
tctagaggaagcatgagcctcaccctggcagacaaggtggtctacgaggaggagatccagaaaagccgcttcatcgccaaggcggcccccgtggcctcggaggaggaggccttggcgtttttggccgagaaccgggagcctgaggccacccacaacggccacgcctacaagatcggcctcctctaccgcttctctgacgacggggagccctcgggcaccgcaggcaggcccatcctccacgccatagaggcccagggcctggaccgggtggcggtcctggtggtgcgctacttcggcggggtgaagctcggggccggggggcttgtgcgggcctacgggggggtggcggcggaggccttaaggcgggcgcccaaggtccccttggtggagcgggtggggctcgccttcctcgtgcccttcgccgaggtgggccgggtctacgccctcctggaggcccgcgcccctgaaggccgaggagacctacaccccggaggcgtgcgcttcgccctcctcctccccaagcccgagcgggaaggtttcctcagggcgctcctggacgccacccggggacaggtggccctggagtagcatggaggcgatgcttccgctctttgaacccaaaggccgggtcctcctggtggacggccaccacctggcctaccgcaccttcttcgccctgaagggcctcaccacgagccggggcgaaccggtgcaggcggtctacggcttcgccaagagcctcctcaaggccctgaaggaggacgggtacaaggccgtcttcgtggtctttgacgccaaggccccctccttccgccacgaggcctacgaggcctacaaggcggggagggccccgacccccgaggacttcccccggcagctcgccctcatcaaggagctggtggacctcctggggtttacccgcctcgaggtccccggctacgaggcggacgacgttctcgccaccctggccaagaaggcggaaaaggaggggtacgaggtgcgcatcctcaccgccgaccgcgacctctaccaactcgtctccgaccgcgtcgccgtcctccaccccgagggccacctcatcaccccggagtggctttgggagaagtacggcctcaggccggagcagtgggtggacttccgcgccctcgtgggggacccctccgacaacctccccggggtcaagggcatcggggagaagaccgccctcaagctcctcaaggagtggggaagcctggaaaacctcctcaagaacctggaccgggtaaagccagaaaacgtccgggagaagatcaaggcccacctggaagacctcaggctctccttggagctctcccgggtgcgcaccgacctccccctggaggtggacctcgcccaggggcgggagcccgaccgggaggggcttagggccttcctggagaggctggagttcggcagcctcctccacgagttcggcctcctggaggcccccgcccccctggaggaggccccctggcccccgccggaaggggccttcgtgggcttcgtcctctcccgccccgagcccatgtgggcggagcttaaagccctggccgcctgcagggacggccgggtgcaccgggcagcagaccccttggcggggctaaaggacctcaaggaggtccggggcctcctcgccaaggacctcgccgtcttggcctcgagggaggggctagacctcgtgcccggggacgaccccatgctcctcgcctacctcctggacccctccaacaccacccccgagggggtggcgcggcgctacgggggggagtggacggaggacgccgcccaccgggccctcctctcggagaggctccatcggaacctccttaagcgcctcgagggggaggagaagctcctttggctctaccacgaggtggaaaagcccctctcccgggtcctggcccacatggaggccaccggggtacggcgggacgtggcctaccttcaggccctttccctggagcttgcggaggagatccgccgcctcgaggaggaggtcttccgcttggcgggccaccccttcaacctcaactcccgggaccagctggaaagggtgctctttgacgagcttaggcttcccgccttggggaagacgcaaaagacaggcaagcgctccaccagcgccgcggtgctggaggccctacgggaggcccaccccatcgtggagaagatcctccagcaccgggagctcaccaagctcaagaacacctacgtggaccccctcccaagcctcgtccacccgaggacgggccgcctccacacccgcttcaaccagacggccacggccacggggaggcttagtagctccgttcccaacctgcagaacatccccgtccgcacccccttgggccagaggatccgccgggccttcgtggccgaggcgggttgggcgttggtggccctggactatagccagatagagctccgcgtcctcgcccacctctccggggacgaaaacctgatcagggtcttccaggaggggaaggacatccacacccagaccgcaagctggatgttcggcgtccccccggaggccgtggaccccctgatgcgccgggcggccaagacggtgaacttcggcgtcctctacggcatgtccgcccataggctctcccaggagcttgccatcccctacgaggaggcggtggcctttatagagcgctacttccaaagcttccccaaggtgcgggcctggatagaaaagaccctggaggaggggaggaagcggggctacgtggaaaccctcttcggaagaaggcgctacgtgcccgacctcaacgcccgggtgaagagcgtcagggaggccgcggagcgcatggccttcaacatgcccgtccagggcaccgccgccgacctcatgaagctcgccatggtgaagctcttcccccgcctccgggagatgggggcccgcatgctcctccaggtccacgacgagctcctcctggaggccccccaagcgcgggccgaggaggtggcggctttggccaaggaggccatggagaaggcctatcccctcgccgtgcccctggaggtggaggtggggatgggggaggactggctttccgccaagggttaggggggccctgccgtttagaggaagttcaaggggttgtccctcagaaacgcctccaggggaacgccctctgggcctaccaggaggcctttagccccaaaggtgcgggtgaaggcttccaggccctggg

SEQ ID NO: 3564 - DNA, 3221 bp, Artificial Sequence
  Description of Artificial Sequence: Synthetic DNA sequence of Thermus thermophilus DNA Polymerase A663R
tctagaggaagcatgagcctcaccctggcagacaaggtggtctacgaggaggagatccagaaaagccgcttcatcgccaaggcggcccccgtggcctcggaggaggaggccttggcgtttttggccgagaaccgggagcctgaggccacccacaacggccacgcctacaagatcggcctcctctaccgcttctctgacgacggggagccctcgggcaccgcaggcaggcccatcctccacgccatagaggcccagggcctggaccgggtggcggtcctggtggtgcgctacttcggcggggtgaagctcggggccggggggcttgtgcgggcctacgggggggtggcggcggaggccttaaggcgggcgcccaaggtccccttggtggagcgggtggggctcgccttcctcgtgcccttcgccgaggtgggccgggtctacgccctcctggaggcccgcgcccctgaaggccgaggagacctacaccccggaggcgtgcgcttcgccctcctcctccccaagcccgagcgggaaggtttcctcagggcgctcctggacgccacccggggacaggtggccctggagtagcatggaggcgatgcttccgctctttgaacccaaaggccgggtcctcctggtggacggccaccacctggcctaccgcaccttcttcgccctgaagggcctcaccacgagccggggcgaaccggtgcaggcggtctacggcttcgccaagagcctcctcaaggccctgaaggaggacgggtacaaggccgtcttcgtggtctttgacgccaaggccccctccttccgccacgaggcctacgaggcctacaaggcggggagggccccgacccccgaggacttcccccggcagctcgccctcatcaaggagctggtggacctcctggggtttacccgcctcgaggtccccggctacgaggcggacgacgttctcgccaccctggccaagaaggcggaaaaggaggggtacgaggtgcgcatcctcaccgccgaccgcgacctctaccaactcgtctccgaccgcgtcgccgtcctccaccccgagggccacctcatcaccccggagtggctttgggagaagtacggcctcaggccggagcagtgggtggacttccgcgccctcgtgggggacccctccgacaacctccccggggtcaagggcatcggggagaagaccgccctcaagctcctcaaggagtggggaagcctggaaaacctcctcaagaacctggaccgggtaaagccagaaaacgtccgggagaagatcaaggcccacctggaagacctcaggctctccttggagctctcccgggtgcgcaccgacctccccctggaggtggacctcgcccaggggcgggagcccgaccgggaggggcttagggccttcctggagaggctggagttcggcagcctcctccacgagttcggcctcctggaggcccccgcccccctggaggaggccccctggcccccgccggaaggggccttcgtgggcttcgtcctctcccgccccgagcccatgtgggcggagcttaaagccctggccgcctgcagggacggccgggtgcaccgggcagcagaccccttggcggggctaaaggacctcaaggaggtccggggcctcctcgccaaggacctcgccgtcttggcctcgagggaggggctagacctcgtgcccggggacgaccccatgctcctcgcctacctcctggacccctccaacaccacccccgagggggtggcgcggcgctacgggggggagtggacggaggacgccgcccaccgggccctcctctcggagaggctccatcggaacctccttaagcgcctcgagggggaggagaagctcctttggctctaccacgaggtggaaaagcccctctcccgggtcctggcccacatggaggccaccggggtacggcgggacgtggcctaccttcaggccctttccctggagcttgcggaggagatccgccgcctcgaggaggaggtcttccgcttggcgggccaccccttcaacctcaactcccgggaccagctggaaagggtgctctttgacgagcttaggcttcccgccttggggaagacgcaaaagacaggcaagcgctccaccagcgccgcggtgctggaggccctacgggaggcccaccccatcgtggagaagatcctccagcaccgggagctcaccaagctcaagaacacctacgtggaccccctcccaagcctcgtccacccgaggacgggccgcctccacacccgcttcaaccagacggccacggccacggggaggcttagtagctccgaccccaacctgcagaacatccccgtccgcacccccttgggccagaggatccgccgggccttcgtggccgaggcgggttgggcgttggtggccctggactatagccagatagagctccgcgtcctcgcccacctctccggggacgaaaacctgatcagggtcttccaggaggggaaggacatccacacccagaccgcaagctggatgttcggcgtccccccggaggccgtggaccccctgatgcgccggcgtgccaagacggtgaacttcggcgtcctctacggcatgtccgcccataggctctcccaggagcttgccatcccctacgaggaggcggtggcctttatagagcgctacttccaaagcttccccaaggtgcgggcctggatagaaaagaccctggaggaggggaggaagcggggctacgtggaaaccctcttcggaagaaggcgctacgtgcccgacctcaacgcccgggtgaagagcgtcagggaggccgcggagcgcatggccttcaacatgcccgtccagggcaccgccgccgacctcatgaagctcgccatggtgaagctcttcccccgcctccgggagatgggggcccgcatgctcctccaggtccacgacgagctcctcctggaggccccccaagcgcgggccgaggaggtggcggctttggccaaggaggccatggagaaggcctatcccctcgccgtgcccctggaggtggaggtggggatgggggaggactggctttccgccaagggttaggggggccctgccgtttagaggaagttcaaggggttgtccctcagaaacgcctccaggggaacgccctctgggcctaccaggaggcctttagccccaaaggtgcgggtgaaggcttccaggccctggg

SEQ ID NO: 3565 - DNA, 3221 bp, Artificial Sequence
  Description of Artificial Sequence: Synthetic DNA sequence of Thermus thermophilus DNA Polymerase A663N
tctagaggaagcatgagcctcaccctggcagacaaggtggtctacgaggaggagatccagaaaagccgcttcatcgccaaggcggcccccgtggcctcggaggaggaggccttggcgtttttggccgagaaccgggagcctgaggccacccacaacggccacgcctacaagatcggcctcctctaccgcttctctgacgacggggagccctcgggcaccgcaggcaggcccatcctccacgccatagaggcccagggcctggaccgggtggcggtcctggtggtgcgctacttcggcggggtgaagctcggggccggggggcttgtgcgggcctacgggggggtggcggcggaggccttaaggcgggcgcccaaggtccccttggtggagcgggtggggctcgccttcctcgtgcccttcgccgaggtgggccgggtctacgccctcctggaggcccgcgcccctgaaggccgaggagacctacaccccggaggcgtgcgcttcgccctcctcctccccaagcccgagcgggaaggtttcctcagggcgctcctggacgccacccggggacaggtggccctggagtagcatggaggcgatgcttccgctctttgaacccaaaggccgggtcctcctggtggacggccaccacctggcctaccgcaccttcttcgccctgaagggcctcaccacgagccggggcgaaccggtgcaggcggtctacggcttcgccaagagcctcctcaaggccctgaaggaggacgggtacaaggccgtcttcgtggtctttgacgccaaggccccctccttccgccacgaggcctacgaggcctacaaggcggggagggccccgacccccgaggacttcccccggcagctcgccctcatcaaggagctggtggacctcctggggtttacccgcctcgaggtccccggctacgaggcggacgacgttctcgccaccctggccaagaaggcggaaaaggaggggtacgaggtgcgcatcctcaccgccgaccgcgacctctaccaactcgtctccgaccgcgtcgccgtcctccaccccgagggccacctcatcaccccggagtggctttgggagaagtacggcctcaggccggagcagtgggtggacttccgcgccctcgtgggggacccctccgacaacctccccggggtcaagggcatcggggagaagaccgccctcaagctcctcaaggagtggggaagcctggaaaacctcctcaagaacctggaccgggtaaagccagaaaacgtccgggagaagatcaaggcccacctggaagacctcaggctctccttggagctctcccgggtgcgcaccgacctccccctggaggtggacctcgcccaggggcgggagcccgaccgggaggggcttagggccttcctggagaggctggagttcggcagcctcctccacgagttcggcctcctggaggcccccgcccccctggaggaggccccctggcccccgccggaaggggccttcgtgggcttcgtcctctcccgccccgagcccatgtgggcggagcttaaagccctggccgcctgcagggacggccgggtgcaccgggcagcagaccccttggcggggctaaaggacctcaaggaggtccggggcctcctcgccaaggacctcgccgtcttggcctcgagggaggggctagacctcgtgcccggggacgaccccatgctcctcgcctacctcctggacccctccaacaccacccccgagggggtggcgcggcgctacgggggggagtggacggaggacgccgcccaccgggccctcctctcggagaggctccatcggaacctccttaagcgcctcgagggggaggagaagctcctttggctctaccacgaggtggaaaagcccctctcccgggtcctggcccacatggaggccaccggggtacggcgggacgtggcctaccttcaggccctttccctggagcttgcggaggagatccgccgcctcgaggaggaggtcttccgcttggcgggccaccccttcaacctcaactcccgggaccagctggaaagggtgctctttgacgagcttaggcttcccgccttggggaagacgcaaaagacaggcaagcgctccaccagcgccgcggtgctggaggccctacgggaggcccaccccatcgtggagaagatcctccagcaccgggagctcaccaagctcaagaacacctacgtggaccccctcccaagcctcgtccacccgaggacgggccgcctccacacccgcttcaaccagacggccacggccacggggaggcttagtagctccgaccccaacctgcagaacatccccgtccgcacccccttgggccagaggatccgccgggccttcgtggccgaggcgggttgggcgttggtggccctggactatagccagatagagctccgcgtcctcgcccacctctccggggacgaaaacctgatcagggtcttccaggaggggaaggacatccacacccagaccgcaagctggatgttcggcgtccccccggaggccgtggaccccctgatgcgccggaatgccaagacggtgaacttcggcgtcctctacggcatgtccgcccataggctctcccaggagcttgccatcccctacgaggaggcggtggcctttatagagcgctacttccaaagcttccccaaggtgcgggcctggatagaaaagaccctggaggaggggaggaagcggggctacgtggaaaccctcttcggaagaaggcgctacgtgcccgacctcaacgcccgggtgaagagcgtcagggaggccgcggagcgcatggccttcaacatgcccgtccagggcaccgccgccgacctcatgaagctcgccatggtgaagctcttcccccgcctccgggagatgggggcccgcatgctcctccaggtccacgacgagctcctcctggaggccccccaagcgcgggccgaggaggtggcggctttggccaaggaggccatggagaaggcctatcccctcgccgtgcccctggaggtggaggtggggatgggggaggactggctttccgccaagggttaggggggccctgccgtttagaggaagttcaaggggttgtccctcagaaacgcctccaggggaacgccctctgggcctaccaggaggcctttagccccaaaggtgcgggtgaaggcttccaggccctggg

SEQ ID NO: 3566 - DNA, 3221 bp, Artificial Sequence
  Description of Artificial Sequence: Synthetic DNA sequence of Thermus thermophilus DNA Polymerase A663D
tctagaggaagcatgagcctcaccctggcagacaaggtggtctacgaggaggagatccagaaaagccgcttcatcgccaaggcggcccccgtggcctcggaggaggaggccttggcgtttttggccgagaaccgggagcctgaggccacccacaacggccacgcctacaagatcggcctcctctaccgcttctctgacgacggggagccctcgggcaccgcaggcaggcccatcctccacgccatagaggcccagggcctggaccgggtggcggtcctggtggtgcgctacttcggcggggtgaagctcggggccggggggcttgtgcgggcctacgggggggtggcggcggaggccttaaggcgggcgcccaaggtccccttggtggagcgggtggggctcgccttcctcgtgcccttcgccgaggtgggccgggtctacgccctcctggaggcccgcgcccctgaaggccgaggagacctacaccccggaggcgtgcgcttcgccctcctcctccccaagcccgagcgggaaggtttcctcagggcgctcctggacgccacccggggacaggtggccctggagtagcatggaggcgatgcttccgctctttgaacccaaaggccgggtcctcctggtggacggccaccacctggcctaccgcaccttcttcgccctgaagggcctcaccacgagccggggcgaaccggtgcaggcggtctacggcttcgccaagagcctcctcaaggccctgaaggaggacgggtacaaggccgtcttcgtggtctttgacgccaaggccccctccttccgccacgaggcctacgaggcctacaaggcggggagggccccgacccccgaggacttcccccggcagctcgccctcatcaaggagctggtggacctcctggggtttacccgcctcgaggtccccggctacgaggcggacgacgttctcgccaccctggccaagaaggcggaaaaggaggggtacgaggtgcgcatcctcaccgccgaccgcgacctctaccaactcgtctccgaccgcgtcgccgtcctccaccccgagggccacctcatcaccccggagtggctttgggagaagtacggcctcaggccggagcagtgggtggacttccgcgccctcgtgggggacccctccgacaacctccccggggtcaagggcatcggggagaagaccgccctcaagctcctcaaggagtggggaagcctggaaaacctcctcaagaacctggaccgggtaaagccagaaaacgtccgggagaagatcaaggcccacctggaagacctcaggctctccttggagctctcccgggtgcgcaccgacctccccctggaggtggacctcgcccaggggcgggagcccgaccgggaggggcttagggccttcctggagaggctggagttcggcagcctcctccacgagttcggcctcctggaggcccccgcccccctggaggaggccccctggcccccgccggaaggggccttcgtgggcttcgtcctctcccgccccgagcccatgtgggcggagcttaaagccctggccgcctgcagggacggccgggtgcaccgggcagcagaccccttggcggggctaaaggacctcaaggaggtccggggcctcctcgccaaggacctcgccgtcttggcctcgagggaggggctagacctcgtgcccggggacgaccccatgctcctcgcctacctcctggacccctccaacaccacccccgagggggtggcgcggcgctacgggggggagtggacggaggacgccgcccaccgggccctcctctcggagaggctccatcggaacctccttaagcgcctcgagggggaggagaagctcctttggctctaccacgaggtggaaaagcccctctcccgggtcctggcccacatggaggccaccggggtacggcgggacgtggcctaccttcaggccctttccctggagcttgcggaggagatccgccgcctcgaggaggaggtcttccgcttggcgggccaccccttcaacctcaactcccgggaccagctggaaagggtgctctttgacgagcttaggcttcccgccttggggaagacgcaaaagacaggcaagcgctccaccagcgccgcggtgctggaggccctacgggaggcccaccccatcgtggagaagatcctccagcaccgggagctcaccaagctcaagaacacctacgtggaccccctcccaagcctcgtccacccgaggacgggccgcctccacacccgcttcaaccagacggccacggccacggggaggcttagtagctccgaccccaacctgcagaacatccccgtccgcacccccttgggccagaggatccgccgggccttcgtggccgaggcgggttgggcgttggtggccctggactatagccagatagagctccgcgtcctcgcccacctctccggggacgaaaacctgatcagggtcttccaggaggggaaggacatccacacccagaccgcaagctggatgttcggcgtccccccggaggccgtggaccccctgatgcgccgggatgccaagacggtgaacttcggcgtcctctacggcatgtccgcccataggctctcccaggagcttgccatcccctacgaggaggcggtggcctttatagagcgctacttccaaagcttccccaaggtgcgggcctggatagaaaagaccctggaggaggggaggaagcggggctacgtggaaaccctcttcggaagaaggcgctacgtgcccgacctcaacgcccgggtgaagagcgtcagggaggccgcggagcgcatggccttcaacatgcccgtccagggcaccgccgccgacctcatgaagctcgccatggtgaagctcttcccccgcctccgggagatgggggcccgcatgctcctccaggtccacgacgagctcctcctggaggccccccaagcgcgggccgaggaggtggcggctttggccaaggaggccatggagaaggcctatcccctcgccgtgcccctggaggtggaggtggggatgggggaggactggctttccgccaagggttaggggggccctgccgtttagaggaagttcaaggggttgtccctcagaaacgcctccaggggaacgccctctgggcctaccaggaggcctttagccccaaaggtgcgggtgaaggcttccaggccctggg

SEQ ID NO: 3567 - DNA, 3221 bp, Artificial Sequence
  Description of Artificial Sequence: Synthetic DNA sequence of Thermus thermophilus DNA Polymerase A663C
tctagaggaagcatgagcctcaccctggcagacaaggtggtctacgaggaggagatccagaaaagccgcttcatcgccaaggcggcccccgtggcctcggaggaggaggccttggcgtttttggccgagaaccgggagcctgaggccacccacaacggccacgcctacaagatcggcctcctctaccgcttctctgacgacggggagccctcgggcaccgcaggcaggcccatcctccacgccatagaggcccagggcctggaccgggtggcggtcctggtggtgcgctacttcggcggggtgaagctcggggccggggggcttgtgcgggcctacgggggggtggcggcggaggccttaaggcgggcgcccaaggtccccttggtggagcgggtggggctcgccttcctcgtgcccttcgccgaggtgggccgggtctacgccctcctggaggcccgcgcccctgaaggccgaggagacctacaccccggaggcgtgcgcttcgccctcctcctccccaagcccgagcgggaaggtttcctcagggcgctcctggacgccacccggggacaggtggccctggagtagcatggaggcgatgcttccgctctttgaacccaaaggccgggtcctcctggtggacggccaccacctggcctaccgcaccttcttcgccctgaagggcctcaccacgagccggggcgaaccggtgcaggcggtctacggcttcgccaagagcctcctcaaggccctgaaggaggacgggtacaaggccgtcttcgtggtctttgacgccaaggccccctccttccgccacgaggcctacgaggcctacaaggcggggagggccccgacccccgaggacttcccccggcagctcgccctcatcaaggagctggtggacctcctggggtttacccgcctcgaggtccccggctacgaggcggacgacgttctcgccaccctggccaagaaggcggaaaaggaggggtacgaggtgcgcatcctcaccgccgaccgcgacctctaccaactcgtctccgaccgcgtcgccgtcctccaccccgagggccacctcatcaccccggagtggctttgggagaagtacggcctcaggccggagcagtgggtggacttccgcgccctcgtgggggacccctccgacaacctccccggggtcaagggcatcggggagaagaccgccctcaagctcctcaaggagtggggaagcctggaaaacctcctcaagaacctggaccgggtaaagccagaaaacgtccgggagaagatcaaggcccacctggaagacctcaggctctccttggagctctcccgggtgcgcaccgacctccccctggaggtggacctcgcccaggggcgggagcccgaccgggaggggcttagggccttcctggagaggctggagttcggcagcctcctccacgagttcggcctcctggaggcccccgcccccctggaggaggccccctggcccccgccggaaggggccttcgtgggcttcgtcctctcccgccccgagcccatgtgggcggagcttaaagccctggccgcctgcagggacggccgggtgcaccgggcagcagaccccttggcggggctaaaggacctcaaggaggtccggggcctcctcgccaaggacctcgccgtcttggcctcgagggaggggctagacctcgtgcccggggacgaccccatgctcctcgcctacctcctggacccctccaacaccacccccgagggggtggcgcggcgctacgggggggagtggacggaggacgccgcccaccgggccctcctctcggagaggctccatcggaacctccttaagcgcctcgagggggaggagaagctcctttggctctaccacgaggtggaaaagcccctctcccgggtcctggcccacatggaggccaccggggtacggcgggacgtggcctaccttcaggccctttccctggagcttgcggaggagatccgccgcctcgaggaggaggtcttccgcttggcgggccaccccttcaacctcaactcccgggaccagctggaaagggtgctctttgacgagcttaggcttcccgccttggggaagacgcaaaagacaggcaagcgctccaccagcgccgcggtgctggaggccctacgggaggcccaccccatcgtggagaagatcctccagcaccgggagctcaccaagctcaagaacacctacgtggaccccctcccaagcctcgtccacccgaggacgggccgcctccacacccgcttcaaccagacggccacggccacggggaggcttagtagctccgaccccaacctgcagaacatccccgtccgcacccccttgggccagaggatccgccgggccttcgtggccgaggcgggttgggcgttggtggccctggactatagccagatagagctccgcgtcctcgcccacctctccggggacgaaaacctgatcagggtcttccaggaggggaaggacatccacacccagaccgcaagctggatgttcggcgtccccccggaggccgtggaccccctgatgcgccggtgtgccaagacggtgaacttcggcgtcctctacggcatgtccgcccataggctctcccaggagcttgccatcccctacgaggaggcggtggcctttatagagcgctacttccaaagcttccccaaggtgcgggcctggatagaaaagaccctggaggaggggaggaagcggggctacgtggaaaccctcttcggaagaaggcgctacgtgcccgacctcaacgcccgggtgaagagcgtcagggaggccgcggagcgcatggccttcaacatgcccgtccagggcaccgccgccgacctcatgaagctcgccatggtgaagctcttcccccgcctccgggagatgggggcccgcatgctcctccaggtccacgacgagctcctcctggaggccccccaagcgcgggccgaggaggtggcggctttggccaaggaggccatggagaaggcctatcccctcgccgtgcccctggaggtggaggtggggatgggggaggactggctttccgccaagggttaggggggccctgccgtttagaggaagttcaaggggttgtccctcagaaacgcctccaggggaacgccctctgggcctaccaggaggcctttagccccaaaggtgcgggtgaaggcttccaggccctggg

SEQ ID NO: 3568 - DNA, 3221 bp, Artificial Sequence
  Description of Artificial Sequence: Synthetic DNA sequence of Thermus thermophilus DNA Polymerase A663E
tctagaggaagcatgagcctcaccctggcagacaaggtggtctacgaggaggagatccagaaaagccgcttcatcgccaaggcggcccccgtggcctcggaggaggaggccttggcgtttttggccgagaaccgggagcctgaggccacccacaacggccacgcctacaagatcggcctcctctaccgcttctctgacgacggggagccctcgggcaccgcaggcaggcccatcctccacgccatagaggcccagggcctggaccgggtggcggtcctggtggtgcgctacttcggcggggtgaagctcggggccggggggcttgtgcgggcctacgggggggtggcggcggaggccttaaggcgggcgcccaaggtccccttggtggagcgggtggggctcgccttcctcgtgcccttcgccgaggtgggccgggtctacgccctcctggaggcccgcgcccctgaaggccgaggagacctacaccccggaggcgtgcgcttcgccctcctcctccccaagcccgagcgggaaggtttcctcagggcgctcctggacgccacccggggacaggtggccctggagtagcatggaggcgatgcttccgctctttgaacccaaaggccgggtcctcctggtggacggccaccacctggcctaccgcaccttcttcgccctgaagggcctcaccacgagccggggcgaaccggtgcaggcggtctacggcttcgccaagagcctcctcaaggccctgaaggaggacgggtacaaggccgtcttcgtggtctttgacgccaaggccccctccttccgccacgaggcctacgaggcctacaaggcggggagggccccgacccccgaggacttcccccggcagctcgccctcatcaaggagctggtggacctcctggggtttacccgcctcgaggtccccggctacgaggcggacgacgttctcgccaccctggccaagaaggcggaaaaggaggggtacgaggtgcgcatcctcaccgccgaccgcgacctctaccaactcgtctccgaccgcgtcgccgtcctccaccccgagggccacctcatcaccccggagtggctttgggagaagtacggcctcaggccggagcagtgggtggacttccgcgccctcgtgggggacccctccgacaacctccccggggtcaagggcatcggggagaagaccgccctcaagctcctcaaggagtggggaagcctggaaaacctcctcaagaacctggaccgggtaaagccagaaaacgtccgggagaagatcaaggcccacctggaagacctcaggctctccttggagctctcccgggtgcgcaccgacctccccctggaggtggacctcgcccaggggcgggagcccgaccgggaggggcttagggccttcctggagaggctggagttcggcagcctcctccacgagttcggcctcctggaggcccccgcccccctggaggaggccccctggcccccgccggaaggggccttcgtgggcttcgtcctctcccgccccgagcccatgtgggcggagcttaaagccctggccgcctgcagggacggccgggtgcaccgggcagcagaccccttggcggggctaaaggacctcaaggaggtccggggcctcctcgccaaggacctcgccgtcttggcctcgagggaggggctagacctcgtgcccggggacgaccccatgctcctcgcctacctcctggacccctccaacaccacccccgagggggtggcgcggcgctacgggggggagtggacggaggacgccgcccaccgggccctcctctcggagaggctccatcggaacctccttaagcgcctcgagggggaggagaagctcctttggctctaccacgaggtggaaaagcccctctcccgggtcctggcccacatggaggccaccggggtacggcgggacgtggcctaccttcaggccctttccctggagcttgcggaggagatccgccgcctcgaggaggaggtcttccgcttggcgggccaccccttcaacctcaactcccgggaccagctggaaagggtgctctttgacgagcttaggcttcccgccttggggaagacgcaaaagacaggcaagcgctccaccagcgccgcggtgctggaggccctacgggaggcccaccccatcgtggagaagatcctccagcaccgggagctcaccaagctcaagaacacctacgtggaccccctcccaagcctcgtccacccgaggacgggccgcctccacacccgcttcaaccagacggccacggccacggggaggcttagtagctccgaccccaacctgcagaacatccccgtccgcacccccttgggccagaggatccgccgggccttcgtggccgaggcgggttgggcgttggtggccctggactatagccagatagagctccgcgtcctcgcccacctctccggggacgaaaacctgatcagggtcttccaggaggggaaggacatccacacccagaccgcaagctggatgttcggcgtccccccggaggccgtggaccccctgatgcgccgggaagccaagacggtgaacttcggcgtcctctacggcatgtccgcccataggctctcccaggagcttgccatcccctacgaggaggcggtggcctttatagagcgctacttccaaagcttccccaaggtgcgggcctggatagaaaagaccctggaggaggggaggaagcggggctacgtggaaaccctcttcggaagaaggcgctacgtgcccgacctcaacgcccgggtgaagagcgtcagggaggccgcggagcgcatggccttcaacatgcccgtccagggcaccgccgccgacctcatgaagctcgccatggtgaagctcttcccccgcctccgggagatgggggcccgcatgctcctccaggtccacgacgagctcctcctggaggccccccaagcgcgggccgaggaggtggcggctttggccaaggaggccatggagaaggcctatcccctcgccgtgcccctggaggtggaggtggggatgggggaggactggctttccgccaagggttaggggggccctgccgtttagaggaagttcaaggggttgtccctcagaaacgcctccaggggaacgccctctgggcctaccaggaggcctttagccccaaaggtgcgggtgaaggcttccaggccctggg

SEQ ID NO: 3569 - DNA, 3221 bp, Artificial Sequence
  Description of Artificial Sequence: Synthetic DNA sequence of Thermus thermophilus DNA Polymerase A663Q
tctagaggaagcatgagcctcaccctggcagacaaggtggtctacgaggaggagatccagaaaagccgcttcatcgccaaggcggcccccgtggcctcggaggaggaggccttggcgtttttggccgagaaccgggagcctgaggccacccacaacggccacgcctacaagatcggcctcctctaccgcttctctgacgacggggagccctcgggcaccgcaggcaggcccatcctccacgccatagaggcccagggcctggaccgggtggcggtcctggtggtgcgctacttcggcggggtgaagctcggggccggggggcttgtgcgggcctacgggggggtggcggcggaggccttaaggcgggcgcccaaggtccccttggtggagcgggtggggctcgccttcctcgtgcccttcgccgaggtgggccgggtctacgccctcctggaggcccgcgcccctgaaggccgaggagacctacaccccggaggcgtgcgcttcgccctcctcctccccaagcccgagcgggaaggtttcctcagggcgctcctggacgccacccggggacaggtggccctggagtagcatggaggcgatgcttccgctctttgaacccaaaggccgggtcctcctggtggacggccaccacctggcctaccgcaccttcttcgccctgaagggcctcaccacgagccggggcgaaccggtgcaggcggtctacggcttcgccaagagcctcctcaaggccctgaaggaggacgggtacaaggccgtcttcgtggtctttgacgccaaggccccctccttccgccacgaggcctacgaggcctacaaggcggggagggccccgacccccgaggacttcccccggcagctcgccctcatcaaggagctggtggacctcctggggtttacccgcctcgaggtccccggctacgaggcggacgacgttctcgccaccctggccaagaaggcggaaaaggaggggtacgaggtgcgcatcctcaccgccgaccgcgacctctaccaactcgtctccgaccgcgtcgccgtcctccaccccgagggccacctcatcaccccggagtggctttgggagaagtacggcctcaggccggagcagtgggtggacttccgcgccctcgtgggggacccctccgacaacctccccggggtcaagggcatcggggagaagaccgccctcaagctcctcaaggagtggggaagcctggaaaacctcctcaagaacctggaccgggtaaagccagaaaacgtccgggagaagatcaaggcccacctggaagacctcaggctctccttggagctctcccgggtgcgcaccgacctccccctggaggtggacctcgcccaggggcgggagcccgaccgggaggggcttagggccttcctggagaggctggagttcggcagcctcctccacgagttcggcctcctggaggcccccgcccccctggaggaggccccctggcccccgccggaaggggccttcgtgggcttcgtcctctcccgccccgagcccatgtgggcggagcttaaagccctggccgcctgcagggacggccgggtgcaccgggcagcagaccccttggcggggctaaaggacctcaaggaggtccggggcctcctcgccaaggacctcgccgtcttggcctcgagggaggggctagacctcgtgcccggggacgaccccatgctcctcgcctacctcctggacccctccaacaccacccccgagggggtggcgcggcgctacgggggggagtggacggaggacgccgcccaccgggccctcctctcggagaggctccatcggaacctccttaagcgcctcgagggggaggagaagctcctttggctctaccacgaggtggaaaagcccctctcccgggtcctggcccacatggaggccaccggggtacggcgggacgtggcctaccttcaggccctttccctggagcttgcggaggagatccgccgcctcgaggaggaggtcttccgcttggcgggccaccccttcaacctcaactcccgggaccagctggaaagggtgctctttgacgagcttaggcttcccgccttggggaagacgcaaaagacaggcaagcgctccaccagcgccgcggtgctggaggccctacgggaggcccaccccatcgtggagaagatcctccagcaccgggagctcaccaagctcaagaacacctacgtggaccccctcccaagcctcgtccacccgaggacgggccgcctccacacccgcttcaaccagacggccacggccacggggaggcttagtagctccgaccccaacctgcagaacatccccgtccgcacccccttgggccagaggatccgccgggccttcgtggccgaggcgggttgggcgttggtggccctggactatagccagatagagctccgcgtcctcgcccacctctccggggacgaaaacctgatcagggtcttccaggaggggaaggacatccacacccagaccgcaagctggatgttcggcgtccccccggaggccgtggaccccctgatgcgccggcaagccaagacggtgaacttcggcgtcctctacggcatgtccgcccataggctctcccaggagcttgccatcccctacgaggaggcggtggcctttatagagcgctacttccaaagcttccccaaggtgcgggcctggatagaaaagaccctggaggaggggaggaagcggggctacgtggaaaccctcttcggaagaaggcgctacgtgcccgacctcaacgcccgggtgaagagcgtcagggaggccgcggagcgcatggccttcaacatgcccgtccagggcaccgccgccgacctcatgaagctcgccatggtgaagctcttcccccgcctccgggagatgggggcccgcatgctcctccaggtccacgacgagctcctcctggaggccccccaagcgcgggccgaggaggtggcggctttggccaaggaggccatggagaaggcctatcccctcgccgtgcccctggaggtggaggtggggatgggggaggactggctttccgccaagggttaggggggccctgccgtttagaggaagttcaaggggttgtccctcagaaacgcctccaggggaacgccctctgggcctaccaggaggcctttagccccaaaggtgcgggtgaaggcttccaggccctggg

SEQ ID NO: 3570 - DNA, 3221 bp, Artificial Sequence
  Description of Artificial Sequence: Synthetic DNA sequence of Thermus thermophilus DNA Polymerase A663G
tctagaggaagcatgagcctcaccctggcagacaaggtggtctacgaggaggagatccagaaaagccgcttcatcgccaaggcggcccccgtggcctcggaggaggaggccttggcgtttttggccgagaaccgggagcctgaggccacccacaacggccacgcctacaagatcggcctcctctaccgcttctctgacgacggggagccctcgggcaccgcaggcaggcccatcctccacgccatagaggcccagggcctggaccgggtggcggtcctggtggtgcgctacttcggcggggtgaagctcggggccggggggcttgtgcgggcctacgggggggtggcggcggaggccttaaggcgggcgcccaaggtccccttggtggagcgggtggggctcgccttcctcgtgcccttcgccgaggtgggccgggtctacgccctcctggaggcccgcgcccctgaaggccgaggagacctacaccccggaggcgtgcgcttcgccctcctcctccccaagcccgagcgggaaggtttcctcagggcgctcctggacgccacccggggacaggtggccctggagtagcatggaggcgatgcttccgctctttgaacccaaaggccgggtcctcctggtggacggccaccacctggcctaccgcaccttcttcgccctgaagggcctcaccacgagccggggcgaaccggtgcaggcggtctacggcttcgccaagagcctcctcaaggccctgaaggaggacgggtacaaggccgtcttcgtggtctttgacgccaaggccccctccttccgccacgaggcctacgaggcctacaaggcggggagggccccgacccccgaggacttcccccggcagctcgccctcatcaaggagctggtggacctcctggggtttacccgcctcgaggtccccggctacgaggcggacgacgttctcgccaccctggccaagaaggcggaaaaggaggggtacgaggtgcgcatcctcaccgccgaccgcgacctctaccaactcgtctccgaccgcgtcgccgtcctccaccccgagggccacctcatcaccccggagtggctttgggagaagtacggcctcaggccggagcagtgggtggacttccgcgccctcgtgggggacccctccgacaacctccccggggtcaagggcatcggggagaagaccgccctcaagctcctcaaggagtggggaagcctggaaaacctcctcaagaacctggaccgggtaaagccagaaaacgtccgggagaagatcaaggcccacctggaagacctcaggctctccttggagctctcccgggtgcgcaccgacctccccctggaggtggacctcgcccaggggcgggagcccgaccgggaggggcttagggccttcctggagaggctggagttcggcagcctcctccacgagttcggcctcctggaggcccccgcccccctggaggaggccccctggcccccgccggaaggggccttcgtgggcttcgtcctctcccgccccgagcccatgtgggcggagcttaaagccctggccgcctgcagggacggccgggtgcaccgggcagcagaccccttggcggggctaaaggacctcaaggaggtccggggcctcctcgccaaggacctcgccgtcttggcctcgagggaggggctagacctcgtgcccggggacgaccccatgctcctcgcctacctcctggacccctccaacaccacccccgagggggtggcgcggcgctacgggggggagtggacggaggacgccgcccaccgggccctcctctcggagaggctccatcggaacctccttaagcgcctcgagggggaggagaagctcctttggctctaccacgaggtggaaaagcccctctcccgggtcctggcccacatggaggccaccggggtacggcgggacgtggcctaccttcaggccctttccctggagcttgcggaggagatccgccgcctcgaggaggaggtcttccgcttggcgggccaccccttcaacctcaactcccgggaccagctggaaagggtgctctttgacgagcttaggcttcccgccttggggaagacgcaaaagacaggcaagcgctccaccagcgccgcggtgctggaggccctacgggaggcccaccccatcgtggagaagatcctccagcaccgggagctcaccaagctcaagaacacctacgtggaccccctcccaagcctcgtccacccgaggacgggccgcctccacacccgcttcaaccagacggccacggccacggggaggcttagtagctccgaccccaacctgcagaacatccccgtccgcacccccttgggccagaggatccgccgggccttcgtggccgaggcgggttgggcgttggtggccctggactatagccagatagagctccgcgtcctcgcccacctctccggggacgaaaacctgatcagggtcttccaggaggggaaggacatccacacccagaccgcaagctggatgttcggcgtccccccggaggccgtggaccccctgatgcgccggggtgccaagacggtgaacttcggcgtcctctacggcatgtccgcccataggctctcccaggagcttgccatcccctacgaggaggcggtggcctttatagagcgctacttccaaagcttccccaaggtgcgggcctggatagaaaagaccctggaggaggggaggaagcggggctacgtggaaaccctcttcggaagaaggcgctacgtgcccgacctcaacgcccgggtgaagagcgtcagggaggccgcggagcgcatggccttcaacatgcccgtccagggcaccgccgccgacctcatgaagctcgccatggtgaagctcttcccccgcctccgggagatgggggcccgcatgctcctccaggtccacgacgagctcctcctggaggccccccaagcgcgggccgaggaggtggcggctttggccaaggaggccatggagaaggcctatcccctcgccgtgcccctggaggtggaggtggggatgggggaggactggctttccgccaagggttaggggggccctgccgtttagaggaagttcaaggggttgtccctcagaaacgcctccaggggaacgccctctgggcctaccaggaggcctttagccccaaaggtgcgggtgaaggcttccaggccctggg

SEQ ID NO: 3571 - DNA, 3221 bp, Artificial Sequence
  Description of Artificial Sequence: Synthetic DNA sequence of Thermus thermophilus DNA Polymerase A663H
tctagaggaagcatgagcctcaccctggcagacaaggtggtctacgaggaggagatccagaaaagccgcttcatcgccaaggcggcccccgtggcctcggaggaggaggccttggcgtttttggccgagaaccgggagcctgaggccacccacaacggccacgcctacaagatcggcctcctctaccgcttctctgacgacggggagccctcgggcaccgcaggcaggcccatcctccacgccatagaggcccagggcctggaccgggtggcggtcctggtggtgcgctacttcggcggggtgaagctcggggccggggggcttgtgcgggcctacgggggggtggcggcggaggccttaaggcgggcgcccaaggtccccttggtggagcgggtggggctcgccttcctcgtgcccttcgccgaggtgggccgggtctacgccctcctggaggcccgcgcccctgaaggccgaggagacctacaccccggaggcgtgcgcttcgccctcctcctccccaagcccgagcgggaaggtttcctcagggcgctcctggacgccacccggggacaggtggccctggagtagcatggaggcgatgcttccgctctttgaacccaaaggccgggtcctcctggtggacggccaccacctggcctaccgcaccttcttcgccctgaagggcctcaccacgagccggggcgaaccggtgcaggcggtctacggcttcgccaagagcctcctcaaggccctgaaggaggacgggtacaaggccgtcttcgtggtctttgacgccaaggccccctccttccgccacgaggcctacgaggcctacaaggcggggagggccccgacccccgaggacttcccccggcagctcgccctcatcaaggagctggtggacctcctggggtttacccgcctcgaggtccccggctacgaggcggacgacgttctcgccaccctggccaagaaggcggaaaaggaggggtacgaggtgcgcatcctcaccgccgaccgcgacctctaccaactcgtctccgaccgcgtcgccgtcctccaccccgagggccacctcatcaccccggagtggctttgggagaagtacggcctcaggccggagcagtgggtggacttccgcgccctcgtgggggacccctccgacaacctccccggggtcaagggcatcggggagaagaccgccctcaagctcctcaaggagtggggaagcctggaaaacctcctcaagaacctggaccgggtaaagccagaaaacgtccgggagaagatcaaggcccacctggaagacctcaggctctccttggagctctcccgggtgcgcaccgacctccccctggaggtggacctcgcccaggggcgggagcccgaccgggaggggcttagggccttcctggagaggctggagttcggcagcctcctccacgagttcggcctcctggaggcccccgcccccctggaggaggccccctggcccccgccggaaggggccttcgtgggcttcgtcctctcccgccccgagcccatgtgggcggagcttaaagccctggccgcctgcagggacggccgggtgcaccgggcagcagaccccttggcggggctaaaggacctcaaggaggtccggggcctcctcgccaaggacctcgccgtcttggcctcgagggaggggctagacctcgtgcccggggacgaccccatgctcctcgcctacctcctggacccctccaacaccacccccgagggggtggcgcggcgctacgggggggagtggacggaggacgccgcccaccgggccctcctctcggagaggctccatcggaacctccttaagcgcctcgagggggaggagaagctcctttggctctaccacgaggtggaaaagcccctctcccgggtcctggcccacatggaggccaccggggtacggcgggacgtggcctaccttcaggccctttccctggagcttgcggaggagatccgccgcctcgaggaggaggtcttccgcttggcgggccaccccttcaacctcaactcccgggaccagctggaaagggtgctctttgacgagcttaggcttcccgccttggggaagacgcaaaagacaggcaagcgctccaccagcgccgcggtgctggaggccctacgggaggcccaccccatcgtggagaagatcctccagcaccgggagctcaccaagctcaagaacacctacgtggaccccctcccaagcctcgtccacccgaggacgggccgcctccacacccgcttcaaccagacggccacggccacggggaggcttagtagctccgaccccaacctgcagaacatccccgtccgcacccccttgggccagaggatccgccgggccttcgtggccgaggcgggttgggcgttggtggccctggactatagccagatagagctccgcgtcctcgcccacctctccggggacgaaaacctgatcagggtcttccaggaggggaaggacatccacacccagaccgcaagctggatgttcggcgtccccccggaggccgtggaccccctgatgcgccggcatgccaagacggtgaacttcggcgtcctctacggcatgtccgcccataggctctcccaggagcttgccatcccctacgaggaggcggtggcctttatagagcgctacttccaaagcttccccaaggtgcgggcctggatagaaaagaccctggaggaggggaggaagcggggctacgtggaaaccctcttcggaagaaggcgctacgtgcccgacctcaacgcccgggtgaagagcgtcagggaggccgcggagcgcatggccttcaacatgcccgtccagggcaccgccgccgacctcatgaagctcgccatggtgaagctcttcccccgcctccgggagatgggggcccgcatgctcctccaggtccacgacgagctcctcctggaggccccccaagcgcgggccgaggaggtggcggctttggccaaggaggccatggagaaggcctatcccctcgccgtgcccctggaggtggaggtggggatgggggaggactggctttccgccaagggttaggggggccctgccgtttagaggaagttcaaggggttgtccctcagaaacgcctccaggggaacgccctctgggcctaccaggaggcctttagccccaaaggtgcgggtgaaggcttccaggccctggg

SEQ ID NO: 3572 - DNA, 3221 bp, Artificial Sequence
  Description of Artificial Sequence: Synthetic DNA sequence of Thermus thermophilus DNA Polymerase A663I
tctagaggaagcatgagcctcaccctggcagacaaggtggtctacgaggaggagatccagaaaagccgcttcatcgccaaggcggcccccgtggcctcggaggaggaggccttggcgtttttggccgagaaccgggagcctgaggccacccacaacggccacgcctacaagatcggcctcctctaccgcttctctgacgacggggagccctcgggcaccgcaggcaggcccatcctccacgccatagaggcccagggcctggaccgggtggcggtcctggtggtgcgctacttcggcggggtgaagctcggggccggggggcttgtgcgggcctacgggggggtggcggcggaggccttaaggcgggcgcccaaggtccccttggtggagcgggtggggctcgccttcctcgtgcccttcgccgaggtgggccgggtctacgccctcctggaggcccgcgcccctgaaggccgaggagacctacaccccggaggcgtgcgcttcgccctcctcctccccaagcccgagcgggaaggtttcctcagggcgctcctggacgccacccggggacaggtggccctggagtagcatggaggcgatgcttccgctctttgaacccaaaggccgggtcctcctggtggacggccaccacctggcctaccgcaccttcttcgccctgaagggcctcaccacgagccggggcgaaccggtgcaggcggtctacggcttcgccaagagcctcctcaaggccctgaaggaggacgggtacaaggccgtcttcgtggtctttgacgccaaggccccctccttccgccacgaggcctacgaggcctacaaggcggggagggccccgacccccgaggacttcccccggcagctcgccctcatcaaggagctggtggacctcctggggtttacccgcctcgaggtccccggctacgaggcggacgacgttctcgccaccctggccaagaaggcggaaaaggaggggtacgaggtgcgcatcctcaccgccgaccgcgacctctaccaactcgtctccgaccgcgtcgccgtcctccaccccgagggccacctcatcaccccggagtggctttgggagaagtacggcctcaggccggagcagtgggtggacttccgcgccctcgtgggggacccctccgacaacctccccggggtcaagggcatcggggagaagaccgccctcaagctcctcaaggagtggggaagcctggaaaacctcctcaagaacctggaccgggtaaagccagaaaacgtccgggagaagatcaaggcccacctggaagacctcaggctctccttggagctctcccgggtgcgcaccgacctccccctggaggtggacctcgcccaggggcgggagcccgaccgggaggggcttagggccttcctggagaggctggagttcggcagcctcctccacgagttcggcctcctggaggcccccgcccccctggaggaggccccctggcccccgccggaaggggccttcgtgggcttcgtcctctcccgccccgagcccatgtgggcggagcttaaagccctggccgcctgcagggacggccgggtgcaccgggcagcagaccccttggcggggctaaaggacctcaaggaggtccggggcctcctcgccaaggacctcgccgtcttggcctcgagggaggggctagacctcgtgcccggggacgaccccatgctcctcgcctacctcctggacccctccaacaccacccccgagggggtggcgcggcgctacgggggggagtggacggaggacgccgcccaccgggccctcctctcggagaggctccatcggaacctccttaagcgcctcgagggggaggagaagctcctttggctctaccacgaggtggaaaagcccctctcccgggtcctggcccacatggaggccaccggggtacggcgggacgtggcctaccttcaggccctttccctggagcttgcggaggagatccgccgcctcgaggaggaggtcttccgcttggcgggccaccccttcaacctcaactcccgggaccagctggaaagggtgctctttgacgagcttaggcttcccgccttggggaagacgcaaaagacaggcaagcgctccaccagcgccgcggtgctggaggccctacgggaggcccaccccatcgtggagaagatcctccagcaccgggagctcaccaagctcaagaacacctacgtggaccccctcccaagcctcgtccacccgaggacgggccgcctccacacccgcttcaaccagacggccacggccacggggaggcttagtagctccgaccccaacctgcagaacatccccgtccgcacccccttgggccagaggatccgccgggccttcgtggccgaggcgggttgggcgttggtggccctggactatagccagatagagctccgcgtcctcgcccacctctccggggacgaaaacctgatcagggtcttccaggaggggaaggacatccacacccagaccgcaagctggatgttcggcgtccccccggaggccgtggaccccctgatgcgccggattgccaagacggtgaacttcggcgtcctctacggcatgtccgcccataggctctcccaggagcttgccatcccctacgaggaggcggtggcctttatagagcgctacttccaaagcttccccaaggtgcgggcctggatagaaaagaccctggaggaggggaggaagcggggctacgtggaaaccctcttcggaagaaggcgctacgtgcccgacctcaacgcccgggtgaagagcgtcagggaggccgcggagcgcatggccttcaacatgcccgtccagggcaccgccgccgacctcatgaagctcgccatggtgaagctcttcccccgcctccgggagatgggggcccgcatgctcctccaggtccacgacgagctcctcctggaggccccccaagcgcgggccgaggaggtggcggctttggccaaggaggccatggagaaggcctatcccctcgccgtgcccctggaggtggaggtggggatgggggaggactggctttccgccaagggttaggggggccctgccgtttagaggaagttcaaggggttgtccctcagaaacgcctccaggggaacgccctctgggcctaccaggaggcctttagccccaaaggtgcgggtgaaggcttccaggccctggg

SEQ ID NO: 3573 - DNA, 3221 bp, Artificial Sequence
  Description of Artificial Sequence: Synthetic DNA sequence of Thermus thermophilus DNA Polymerase A663L
tctagaggaagcatgagcctcaccctggcagacaaggtggtctacgaggaggagatccagaaaagccgcttcatcgccaaggcggcccccgtggcctcggaggaggaggccttggcgtttttggccgagaaccgggagcctgaggccacccacaacggccacgcctacaagatcggcctcctctaccgcttctctgacgacggggagccctcgggcaccgcaggcaggcccatcctccacgccatagaggcccagggcctggaccgggtggcggtcctggtggtgcgctacttcggcggggtgaagctcggggccggggggcttgtgcgggcctacgggggggtggcggcggaggccttaaggcgggcgcccaaggtccccttggtggagcgggtggggctcgccttcctcgtgcccttcgccgaggtgggccgggtctacgccctcctggaggcccgcgcccctgaaggccgaggagacctacaccccggaggcgtgcgcttcgccctcctcctccccaagcccgagcgggaaggtttcctcagggcgctcctggacgccacccggggacaggtggccctggagtagcatggaggcgatgcttccgctctttgaacccaaaggccgggtcctcctggtggacggccaccacctggcctaccgcaccttcttcgccctgaagggcctcaccacgagccggggcgaaccggtgcaggcggtctacggcttcgccaagagcctcctcaaggccctgaaggaggacgggtacaaggccgtcttcgtggtctttgacgccaaggccccctccttccgccacgaggcctacgaggcctacaaggcggggagggccccgacccccgaggacttcccccggcagctcgccctcatcaaggagctggtggacctcctggggtttacccgcctcgaggtccccggctacgaggcggacgacgttctcgccaccctggccaagaaggcggaaaaggaggggtacgaggtgcgcatcctcaccgccgaccgcgacctctaccaactcgtctccgaccgcgtcgccgtcctccaccccgagggccacctcatcaccccggagtggctttgggagaagtacggcctcaggccggagcagtgggtggacttccgcgccctcgtgggggacccctccgacaacctccccggggtcaagggcatcggggagaagaccgccctcaagctcctcaaggagtggggaagcctggaaaacctcctcaagaacctggaccgggtaaagccagaaaacgtccgggagaagatcaaggcccacctggaagacctcaggctctccttggagctctcccgggtgcgcaccgacctccccctggaggtggacctcgcccaggggcgggagcccgaccgggaggggcttagggccttcctggagaggctggagttcggcagcctcctccacgagttcggcctcctggaggcccccgcccccctggaggaggccccctggcccccgccggaaggggccttcgtgggcttcgtcctctcccgccccgagcccatgtgggcggagcttaaagccctggccgcctgcagggacggccgggtgcaccgggcagcagaccccttggcggggctaaaggacctcaaggaggtccggggcctcctcgccaaggacctcgccgtcttggcctcgagggaggggctagacctcgtgcccggggacgaccccatgctcctcgcctacctcctggacccctccaacaccacccccgagggggtggcgcggcgctacgggggggagtggacggaggacgccgcccaccgggccctcctctcggagaggctccatcggaacctccttaagcgcctcgagggggaggagaagctcctttggctctaccacgaggtggaaaagcccctctcccgggtcctggcccacatggaggccaccggggtacggcgggacgtggcctaccttcaggccctttccctggagcttgcggaggagatccgccgcctcgaggaggaggtcttccgcttggcgggccaccccttcaacctcaactcccgggaccagctggaaagggtgctctttgacgagcttaggcttcccgccttggggaagacgcaaaagacaggcaagcgctccaccagcgccgcggtgctggaggccctacgggaggcccaccccatcgtggagaagatcctccagcaccgggagctcaccaagctcaagaacacctacgtggaccccctcccaagcctcgtccacccgaggacgggccgcctccacacccgcttcaaccagacggccacggccacggggaggcttagtagctccgaccccaacctgcagaacatccccgtccgcacccccttgggccagaggatccgccgggccttcgtggccgaggcgggttgggcgttggtggccctggactatagccagatagagctccgcgtcctcgcccacctctccggggacgaaaacctgatcagggtcttccaggaggggaaggacatccacacccagaccgcaagctggatgttcggcgtccccccggaggccgtggaccccctgatgcgccggcttgccaagacggtgaacttcggcgtcctctacggcatgtccgcccataggctctcccaggagcttgccatcccctacgaggaggcggtggcctttatagagcgctacttccaaagcttccccaaggtgcgggcctggatagaaaagaccctggaggaggggaggaagcggggctacgtggaaaccctcttcggaagaaggcgctacgtgcccgacctcaacgcccgggtgaagagcgtcagggaggccgcggagcgcatggccttcaacatgcccgtccagggcaccgccgccgacctcatgaagctcgccatggtgaagctcttcccccgcctccgggagatgggggcccgcatgctcctccaggtccacgacgagctcctcctggaggccccccaagcgcgggccgaggaggtggcggctttggccaaggaggccatggagaaggcctatcccctcgccgtgcccctggaggtggaggtggggatgggggaggactggctttccgccaagggttaggggggccctgccgtttagaggaagttcaaggggttgtccctcagaaacgcctccaggggaacgccctctgggcctaccaggaggcctttagccccaaaggtgcgggtgaaggcttccaggccctggg

SEQ ID NO: 3574 - DNA, 3221 bp, Artificial Sequence
  Description of Artificial Sequence: Synthetic DNA sequence of Thermus thermophilus DNA Polymerase A663K
tctagaggaagcatgagcctcaccctggcagacaaggtggtctacgaggaggagatccagaaaagccgcttcatcgccaaggcggcccccgtggcctcggaggaggaggccttggcgtttttggccgagaaccgggagcctgaggccacccacaacggccacgcctacaagatcggcctcctctaccgcttctctgacgacggggagccctcgggcaccgcaggcaggcccatcctccacgccatagaggcccagggcctggaccgggtggcggtcctggtggtgcgctacttcggcggggtgaagctcggggccggggggcttgtgcgggcctacgggggggtggcggcggaggccttaaggcgggcgcccaaggtccccttggtggagcgggtggggctcgccttcctcgtgcccttcgccgaggtgggccgggtctacgccctcctggaggcccgcgcccctgaaggccgaggagacctacaccccggaggcgtgcgcttcgccctcctcctccccaagcccgagcgggaaggtttcctcagggcgctcctggacgccacccggggacaggtggccctggagtagcatggaggcgatgcttccgctctttgaacccaaaggccgggtcctcctggtggacggccaccacctggcctaccgcaccttcttcgccctgaagggcctcaccacgagccggggcgaaccggtgcaggcggtctacggcttcgccaagagcctcctcaaggccctgaaggaggacgggtacaaggccgtcttcgtggtctttgacgccaaggccccctccttccgccacgaggcctacgaggcctacaaggcggggagggccccgacccccgaggacttcccccggcagctcgccctcatcaaggagctggtggacctcctggggtttacccgcctcgaggtccccggctacgaggcggacgacgttctcgccaccctggccaagaaggcggaaaaggaggggtacgaggtgcgcatcctcaccgccgaccgcgacctctaccaactcgtctccgaccgcgtcgccgtcctccaccccgagggccacctcatcaccccggagtggctttgggagaagtacggcctcaggccggagcagtgggtggacttccgcgccctcgtgggggacccctccgacaacctccccggggtcaagggcatcggggagaagaccgccctcaagctcctcaaggagtggggaagcctggaaaacctcctcaagaacctggaccgggtaaagccagaaaacgtccgggagaagatcaaggcccacctggaagacctcaggctctccttggagctctcccgggtgcgcaccgacctccccctggaggtggacctcgcccaggggcgggagcccgaccgggaggggcttagggccttcctggagaggctggagttcggcagcctcctccacgagttcggcctcctggaggcccccgcccccctggaggaggccccctggcccccgccggaaggggccttcgtgggcttcgtcctctcccgccccgagcccatgtgggcggagcttaaagccctggccgcctgcagggacggccgggtgcaccgggcagcagaccccttggcggggctaaaggacctcaaggaggtccggggcctcctcgccaaggacctcgccgtcttggcctcgagggaggggctagacctcgtgcccggggacgaccccatgctcctcgcctacctcctggacccctccaacaccacccccgagggggtggcgcggcgctacgggggggagtggacggaggacgccgcccaccgggccctcctctcggagaggctccatcggaacctccttaagcgcctcgagggggaggagaagctcctttggctctaccacgaggtggaaaagcccctctcccgggtcctggcccacatggaggccaccggggtacggcgggacgtggcctaccttcaggccctttccctggagcttgcggaggagatccgccgcctcgaggaggaggtcttccgcttggcgggccaccccttcaacctcaactcccgggaccagctggaaagggtgctctttgacgagcttaggcttcccgccttggggaagacgcaaaagacaggcaagcgctccaccagcgccgcggtgctggaggccctacgggaggcccaccccatcgtggagaagatcctccagcaccgggagctcaccaagctcaagaacacctacgtggaccccctcccaagcctcgtccacccgaggacgggccgcctccacacccgcttcaaccagacggccacggccacggggaggcttagtagctccgaccccaacctgcagaacatccccgtccgcacccccttgggccagaggatccgccgggccttcgtggccgaggcgggttgggcgttggtggccctggactatagccagatagagctccgcgtcctcgcccacctctccggggacgaaaacctgatcagggtcttccaggaggggaaggacatccacacccagaccgcaagctggatgttcggcgtccccccggaggccgtggaccccctgatgcgccggaaagccaagacggtgaacttcggcgtcctctacggcatgtccgcccataggctctcccaggagcttgccatcccctacgaggaggcggtggcctttatagagcgctacttccaaagcttccccaaggtgcgggcctggatagaaaagaccctggaggaggggaggaagcggggctacgtggaaaccctcttcggaagaaggcgctacgtgcccgacctcaacgcccgggtgaagagcgtcagggaggccgcggagcgcatggccttcaacatgcccgtccagggcaccgccgccgacctcatgaagctcgccatggtgaagctcttcccccgcctccgggagatgggggcccgcatgctcctccaggtccacgacgagctcctcctggaggccccccaagcgcgggccgaggaggtggcggctttggccaaggaggccatggagaaggcctatcccctcgccgtgcccctggaggtggaggtggggatgggggaggactggctttccgccaagggttaggggggccctgccgtttagaggaagttcaaggggttgtccctcagaaacgcctccaggggaacgccctctgggcctaccaggaggcctttagccccaaaggtgcgggtgaaggcttccaggccctggg

SEQ ID NO: 3575 - DNA, 3221 bp, Artificial Sequence
  Description of Artificial Sequence: Synthetic DNA sequence of Thermus thermophilus DNA Polymerase A663M
tctagaggaagcatgagcctcaccctggcagacaaggtggtctacgaggaggagatccagaaaagccgcttcatcgccaaggcggcccccgtggcctcggaggaggaggccttggcgtttttggccgagaaccgggagcctgaggccacccacaacggccacgcctacaagatcggcctcctctaccgcttctctgacgacggggagccctcgggcaccgcaggcaggcccatcctccacgccatagaggcccagggcctggaccgggtggcggtcctggtggtgcgctacttcggcggggtgaagctcggggccggggggcttgtgcgggcctacgggggggtggcggcggaggccttaaggcgggcgcccaaggtccccttggtggagcgggtggggctcgccttcctcgtgcccttcgccgaggtgggccgggtctacgccctcctggaggcccgcgcccctgaaggccgaggagacctacaccccggaggcgtgcgcttcgccctcctcctccccaagcccgagcgggaaggtttcctcagggcgctcctggacgccacccggggacaggtggccctggagtagcatggaggcgatgcttccgctctttgaacccaaaggccgggtcctcctggtggacggccaccacctggcctaccgcaccttcttcgccctgaagggcctcaccacgagccggggcgaaccggtgcaggcggtctacggcttcgccaagagcctcctcaaggccctgaaggaggacgggtacaaggccgtcttcgtggtctttgacgccaaggccccctccttccgccacgaggcctacgaggcctacaaggcggggagggccccgacccccgaggacttcccccggcagctcgccctcatcaaggagctggtggacctcctggggtttacccgcctcgaggtccccggctacgaggcggacgacgttctcgccaccctggccaagaaggcggaaaaggaggggtacgaggtgcgcatcctcaccgccgaccgcgacctctaccaactcgtctccgaccgcgtcgccgtcctccaccccgagggccacctcatcaccccggagtggctttgggagaagtacggcctcaggccggagcagtgggtggacttccgcgccctcgtgggggacccctccgacaacctccccggggtcaagggcatcggggagaagaccgccctcaagctcctcaaggagtggggaagcctggaaaacctcctcaagaacctggaccgggtaaagccagaaaacgtccgggagaagatcaaggcccacctggaagacctcaggctctccttggagctctcccgggtgcgcaccgacctccccctggaggtggacctcgcccaggggcgggagcccgaccgggaggggcttagggccttcctggagaggctggagttcggcagcctcctccacgagttcggcctcctggaggcccccgcccccctggaggaggccccctggcccccgccggaaggggccttcgtgggcttcgtcctctcccgccccgagcccatgtgggcggagcttaaagccctggccgcctgcagggacggccgggtgcaccgggcagcagaccccttggcggggctaaaggacctcaaggaggtccggggcctcctcgccaaggacctcgccgtcttggcctcgagggaggggctagacctcgtgcccggggacgaccccatgctcctcgcctacctcctggacccctccaacaccacccccgagggggtggcgcggcgctacgggggggagtggacggaggacgccgcccaccgggccctcctctcggagaggctccatcggaacctccttaagcgcctcgagggggaggagaagctcctttggctctaccacgaggtggaaaagcccctctcccgggtcctggcccacatggaggccaccggggtacggcgggacgtggcctaccttcaggccctttccctggagcttgcggaggagatccgccgcctcgaggaggaggtcttccgcttggcgggccaccccttcaacctcaactcccgggaccagctggaaagggtgctctttgacgagcttaggcttcccgccttggggaagacgcaaaagacaggcaagcgctccaccagcgccgcggtgctggaggccctacgggaggcccaccccatcgtggagaagatcctccagcaccgggagctcaccaagctcaagaacacctacgtggaccccctcccaagcctcgtccacccgaggacgggccgcctccacacccgcttcaaccagacggccacggccacggggaggcttagtagctccgaccccaacctgcagaacatccccgtccgcacccccttgggccagaggatccgccgggccttcgtggccgaggcgggttgggcgttggtggccctggactatagccagatagagctccgcgtcctcgcccacctctccggggacgaaaacctgatcagggtcttccaggaggggaaggacatccacacccagaccgcaagctggatgttcggcgtccccccggaggccgtggaccccctgatgcgccggatggccaagacggtgaacttcggcgtcctctacggcatgtccgcccataggctctcccaggagcttgccatcccctacgaggaggcggtggcctttatagagcgctacttccaaagcttccccaaggtgcgggcctggatagaaaagaccctggaggaggggaggaagcggggctacgtggaaaccctcttcggaagaaggcgctacgtgcccgacctcaacgcccgggtgaagagcgtcagggaggccgcggagcgcatggccttcaacatgcccgtccagggcaccgccgccgacctcatgaagctcgccatggtgaagctcttcccccgcctccgggagatgggggcccgcatgctcctccaggtccacgacgagctcctcctggaggccccccaagcgcgggccgaggaggtggcggctttggccaaggaggccatggagaaggcctatcccctcgccgtgcccctggaggtggaggtggggatgggggaggactggctttccgccaagggttaggggggccctgccgtttagaggaagttcaaggggttgtccctcagaaacgcctccaggggaacgccctctgggcctaccaggaggcctttagccccaaaggtgcgggtgaaggcttccaggccctggg

SEQ ID NO: 3576 - DNA, 3221 bp, Artificial Sequence
  Description of Artificial Sequence: Synthetic DNA sequence of Thermus thermophilus DNA Polymerase A663F
tctagaggaagcatgagcctcaccctggcagacaaggtggtctacgaggaggagatccagaaaagccgcttcatcgccaaggcggcccccgtggcctcggaggaggaggccttggcgtttttggccgagaaccgggagcctgaggccacccacaacggccacgcctacaagatcggcctcctctaccgcttctctgacgacggggagccctcgggcaccgcaggcaggcccatcctccacgccatagaggcccagggcctggaccgggtggcggtcctggtggtgcgctacttcggcggggtgaagctcggggccggggggcttgtgcgggcctacgggggggtggcggcggaggccttaaggcgggcgcccaaggtccccttggtggagcgggtggggctcgccttcctcgtgcccttcgccgaggtgggccgggtctacgccctcctggaggcccgcgcccctgaaggccgaggagacctacaccccggaggcgtgcgcttcgccctcctcctccccaagcccgagcgggaaggtttcctcagggcgctcctggacgccacccggggacaggtggccctggagtagcatggaggcgatgcttccgctctttgaacccaaaggccgggtcctcctggtggacggccaccacctggcctaccgcaccttcttcgccctgaagggcctcaccacgagccggggcgaaccggtgcaggcggtctacggcttcgccaagagcctcctcaaggccctgaaggaggacgggtacaaggccgtcttcgtggtctttgacgccaaggccccctccttccgccacgaggcctacgaggcctacaaggcggggagggccccgacccccgaggacttcccccggcagctcgccctcatcaaggagctggtggacctcctggggtttacccgcctcgaggtccccggctacgaggcggacgacgttctcgccaccctggccaagaaggcggaaaaggaggggtacgaggtgcgcatcctcaccgccgaccgcgacctctaccaactcgtctccgaccgcgtcgccgtcctccaccccgagggccacctcatcaccccggagtggctttgggagaagtacggcctcaggccggagcagtgggtggacttccgcgccctcgtgggggacccctccgacaacctccccggggtcaagggcatcggggagaagaccgccctcaagctcctcaaggagtggggaagcctggaaaacctcctcaagaacctggaccgggtaaagccagaaaacgtccgggagaagatcaaggcccacctggaagacctcaggctctccttggagctctcccgggtgcgcaccgacctccccctggaggtggacctcgcccaggggcgggagcccgaccgggaggggcttagggccttcctggagaggctggagttcggcagcctcctccacgagttcggcctcctggaggcccccgcccccctggaggaggccccctggcccccgccggaaggggccttcgtgggcttcgtcctctcccgccccgagcccatgtgggcggagcttaaagccctggccgcctgcagggacggccgggtgcaccgggcagcagaccccttggcggggctaaaggacctcaaggaggtccggggcctcctcgccaaggacctcgccgtcttggcctcgagggaggggctagacctcgtgcccggggacgaccccatgctcctcgcctacctcctggacccctccaacaccacccccgagggggtggcgcggcgctacgggggggagtggacggaggacgccgcccaccgggccctcctctcggagaggctccatcggaacctccttaagcgcctcgagggggaggagaagctcctttggctctaccacgaggtggaaaagcccctctcccgggtcctggcccacatggaggccaccggggtacggcgggacgtggcctaccttcaggccctttccctggagcttgcggaggagatccgccgcctcgaggaggaggtcttccgcttggcgggccaccccttcaacctcaactcccgggaccagctggaaagggtgctctttgacgagcttaggcttcccgccttggggaagacgcaaaagacaggcaagcgctccaccagcgccgcggtgctggaggccctacgggaggcccaccccatcgtggagaagatcctccagcaccgggagctcaccaagctcaagaacacctacgtggaccccctcccaagcctcgtccacccgaggacgggccgcctccacacccgcttcaaccagacggccacggccacggggaggcttagtagctccgaccccaacctgcagaacatccccgtccgcacccccttgggccagaggatccgccgggccttcgtggccgaggcgggttgggcgttggtggccctggactatagccagatagagctccgcgtcctcgcccacctctccggggacgaaaacctgatcagggtcttccaggaggggaaggacatccacacccagaccgcaagctggatgttcggcgtccccccggaggccgtggaccccctgatgcgccggtttgccaagacggtgaacttcggcgtcctctacggcatgtccgcccataggctctcccaggagcttgccatcccctacgaggaggcggtggcctttatagagcgctacttccaaagcttccccaaggtgcgggcctggatagaaaagaccctggaggaggggaggaagcggggctacgtggaaaccctcttcggaagaaggcgctacgtgcccgacctcaacgcccgggtgaagagcgtcagggaggccgcggagcgcatggccttcaacatgcccgtccagggcaccgccgccgacctcatgaagctcgccatggtgaagctcttcccccgcctccgggagatgggggcccgcatgctcctccaggtccacgacgagctcctcctggaggccccccaagcgcgggccgaggaggtggcggctttggccaaggaggccatggagaaggcctatcccctcgccgtgcccctggaggtggaggtggggatgggggaggactggctttccgccaagggttaggggggccctgccgtttagaggaagttcaaggggttgtccctcagaaacgcctccaggggaacgccctctgggcctaccaggaggcctttagccccaaaggtgcgggtgaaggcttccaggccctggg

SEQ ID NO: 3577 - DNA, 3221 bp, Artificial Sequence
  Description of Artificial Sequence: Synthetic DNA sequence of Thermus thermophilus DNA Polymerase A663P
tctagaggaagcatgagcctcaccctggcagacaaggtggtctacgaggaggagatccagaaaagccgcttcatcgccaaggcggcccccgtggcctcggaggaggaggccttggcgtttttggccgagaaccgggagcctgaggccacccacaacggccacgcctacaagatcggcctcctctaccgcttctctgacgacggggagccctcgggcaccgcaggcaggcccatcctccacgccatagaggcccagggcctggaccgggtggcggtcctggtggtgcgctacttcggcggggtgaagctcggggccggggggcttgtgcgggcctacgggggggtggcggcggaggccttaaggcgggcgcccaaggtccccttggtggagcgggtggggctcgccttcctcgtgcccttcgccgaggtgggccgggtctacgccctcctggaggcccgcgcccctgaaggccgaggagacctacaccccggaggcgtgcgcttcgccctcctcctccccaagcccgagcgggaaggtttcctcagggcgctcctggacgccacccggggacaggtggccctggagtagcatggaggcgatgcttccgctctttgaacccaaaggccgggtcctcctggtggacggccaccacctggcctaccgcaccttcttcgccctgaagggcctcaccacgagccggggcgaaccggtgcaggcggtctacggcttcgccaagagcctcctcaaggccctgaaggaggacgggtacaaggccgtcttcgtggtctttgacgccaaggccccctccttccgccacgaggcctacgaggcctacaaggcggggagggccccgacccccgaggacttcccccggcagctcgccctcatcaaggagctggtggacctcctggggtttacccgcctcgaggtccccggctacgaggcggacgacgttctcgccaccctggccaagaaggcggaaaaggaggggtacgaggtgcgcatcctcaccgccgaccgcgacctctaccaactcgtctccgaccgcgtcgccgtcctccaccccgagggccacctcatcaccccggagtggctttgggagaagtacggcctcaggccggagcagtgggtggacttccgcgccctcgtgggggacccctccgacaacctccccggggtcaagggcatcggggagaagaccgccctcaagctcctcaaggagtggggaagcctggaaaacctcctcaagaacctggaccgggtaaagccagaaaacgtccgggagaagatcaaggcccacctggaagacctcaggctctccttggagctctcccgggtgcgcaccgacctccccctggaggtggacctcgcccaggggcgggagcccgaccgggaggggcttagggccttcctggagaggctggagttcggcagcctcctccacgagttcggcctcctggaggcccccgcccccctggaggaggccccctggcccccgccggaaggggccttcgtgggcttcgtcctctcccgccccgagcccatgtgggcggagcttaaagccctggccgcctgcagggacggccgggtgcaccgggcagcagaccccttggcggggctaaaggacctcaaggaggtccggggcctcctcgccaaggacctcgccgtcttggcctcgagggaggggctagacctcgtgcccggggacgaccccatgctcctcgcctacctcctggacccctccaacaccacccccgagggggtggcgcggcgctacgggggggagtggacggaggacgccgcccaccgggccctcctctcggagaggctccatcggaacctccttaagcgcctcgagggggaggagaagctcctttggctctaccacgaggtggaaaagcccctctcccgggtcctggcccacatggaggccaccggggtacggcgggacgtggcctaccttcaggccctttccctggagcttgcggaggagatccgccgcctcgaggaggaggtcttccgcttggcgggccaccccttcaacctcaactcccgggaccagctggaaagggtgctctttgacgagcttaggcttcccgccttggggaagacgcaaaagacaggcaagcgctccaccagcgccgcggtgctggaggccctacgggaggcccaccccatcgtggagaagatcctccagcaccgggagctcaccaagctcaagaacacctacgtggaccccctcccaagcctcgtccacccgaggacgggccgcctccacacccgcttcaaccagacggccacggccacggggaggcttagtagctccgaccccaacctgcagaacatccccgtccgcacccccttgggccagaggatccgccgggccttcgtggccgaggcgggttgggcgttggtggccctggactatagccagatagagctccgcgtcctcgcccacctctccggggacgaaaacctgatcagggtcttccaggaggggaaggacatccacacccagaccgcaagctggatgttcggcgtccccccggaggccgtggaccccctgatgcgccggcctgccaagacggtgaacttcggcgtcctctacggcatgtccgcccataggctctcccaggagcttgccatcccctacgaggaggcggtggcctttatagagcgctacttccaaagcttccccaaggtgcgggcctggatagaaaagaccctggaggaggggaggaagcggggctacgtggaaaccctcttcggaagaaggcgctacgtgcccgacctcaacgcccgggtgaagagcgtcagggaggccgcggagcgcatggccttcaacatgcccgtccagggcaccgccgccgacctcatgaagctcgccatggtgaagctcttcccccgcctccgggagatgggggcccgcatgctcctccaggtccacgacgagctcctcctggaggccccccaagcgcgggccgaggaggtggcggctttggccaaggaggccatggagaaggcctatcccctcgccgtgcccctggaggtggaggtggggatgggggaggactggctttccgccaagggttaggggggccctgccgtttagaggaagttcaaggggttgtccctcagaaacgcctccaggggaacgccctctgggcctaccaggaggcctttagccccaaaggtgcgggtgaaggcttccaggccctggg

SEQ ID NO: 3578 - DNA, 3221 bp, Artificial Sequence
  Description of Artificial Sequence: Synthetic DNA sequence of Thermus thermophilus DNA Polymerase A663S
tctagaggaagcatgagcctcaccctggcagacaaggtggtctacgaggaggagatccagaaaagccgcttcatcgccaaggcggcccccgtggcctcggaggaggaggccttggcgtttttggccgagaaccgggagcctgaggccacccacaacggccacgcctacaagatcggcctcctctaccgcttctctgacgacggggagccctcgggcaccgcaggcaggcccatcctccacgccatagaggcccagggcctggaccgggtggcggtcctggtggtgcgctacttcggcggggtgaagctcggggccggggggcttgtgcgggcctacgggggggtggcggcggaggccttaaggcgggcgcccaaggtccccttggtggagcgggtggggctcgccttcctcgtgcccttcgccgaggtgggccgggtctacgccctcctggaggcccgcgcccctgaaggccgaggagacctacaccccggaggcgtgcgcttcgccctcctcctccccaagcccgagcgggaaggtttcctcagggcgctcctggacgccacccggggacaggtggccctggagtagcatggaggcgatgcttccgctctttgaacccaaaggccgggtcctcctggtggacggccaccacctggcctaccgcaccttcttcgccctgaagggcctcaccacgagccggggcgaaccggtgcaggcggtctacggcttcgccaagagcctcctcaaggccctgaaggaggacgggtacaaggccgtcttcgtggtctttgacgccaaggccccctccttccgccacgaggcctacgaggcctacaaggcggggagggccccgacccccgaggacttcccccggcagctcgccctcatcaaggagctggtggacctcctggggtttacccgcctcgaggtccccggctacgaggcggacgacgttctcgccaccctggccaagaaggcggaaaaggaggggtacgaggtgcgcatcctcaccgccgaccgcgacctctaccaactcgtctccgaccgcgtcgccgtcctccaccccgagggccacctcatcaccccggagtggctttgggagaagtacggcctcaggccggagcagtgggtggacttccgcgccctcgtgggggacccctccgacaacctccccggggtcaagggcatcggggagaagaccgccctcaagctcctcaaggagtggggaagcctggaaaacctcctcaagaacctggaccgggtaaagccagaaaacgtccgggagaagatcaaggcccacctggaagacctcaggctctccttggagctctcccgggtgcgcaccgacctccccctggaggtggacctcgcccaggggcgggagcccgaccgggaggggcttagggccttcctggagaggctggagttcggcagcctcctccacgagttcggcctcctggaggcccccgcccccctggaggaggccccctggcccccgccggaaggggccttcgtgggcttcgtcctctcccgccccgagcccatgtgggcggagcttaaagccctggccgcctgcagggacggccgggtgcaccgggcagcagaccccttggcggggctaaaggacctcaaggaggtccggggcctcctcgccaaggacctcgccgtcttggcctcgagggaggggctagacctcgtgcccggggacgaccccatgctcctcgcctacctcctggacccctccaacaccacccccgagggggtggcgcggcgctacgggggggagtggacggaggacgccgcccaccgggccctcctctcggagaggctccatcggaacctccttaagcgcctcgagggggaggagaagctcctttggctctaccacgaggtggaaaagcccctctcccgggtcctggcccacatggaggccaccggggtacggcgggacgtggcctaccttcaggccctttccctggagcttgcggaggagatccgccgcctcgaggaggaggtcttccgcttggcgggccaccccttcaacctcaactcccgggaccagctggaaagggtgctctttgacgagcttaggcttcccgccttggggaagacgcaaaagacaggcaagcgctccaccagcgccgcggtgctggaggccctacgggaggcccaccccatcgtggagaagatcctccagcaccgggagctcaccaagctcaagaacacctacgtggaccccctcccaagcctcgtccacccgaggacgggccgcctccacacccgcttcaaccagacggccacggccacggggaggcttagtagctccgaccccaacctgcagaacatccccgtccgcacccccttgggccagaggatccgccgggccttcgtggccgaggcgggttgggcgttggtggccctggactatagccagatagagctccgcgtcctcgcccacctctccggggacgaaaacctgatcagggtcttccaggaggggaaggacatccacacccagaccgcaagctggatgttcggcgtccccccggaggccgtggaccccctgatgcgccggtctgccaagacggtgaacttcggcgtcctctacggcatgtccgcccataggctctcccaggagcttgccatcccctacgaggaggcggtggcctttatagagcgctacttccaaagcttccccaaggtgcgggcctggatagaaaagaccctggaggaggggaggaagcggggctacgtggaaaccctcttcggaagaaggcgctacgtgcccgacctcaacgcccgggtgaagagcgtcagggaggccgcggagcgcatggccttcaacatgcccgtccagggcaccgccgccgacctcatgaagctcgccatggtgaagctcttcccccgcctccgggagatgggggcccgcatgctcctccaggtccacgacgagctcctcctggaggccccccaagcgcgggccgaggaggtggcggctttggccaaggaggccatggagaaggcctatcccctcgccgtgcccctggaggtggaggtggggatgggggaggactggctttccgccaagggttaggggggccctgccgtttagaggaagttcaaggggttgtccctcagaaacgcctccaggggaacgccctctgggcctaccaggaggcctttagccccaaaggtgcgggtgaaggcttccaggccctggg

SEQ ID NO: 3579 - DNA, 3221 bp, Artificial Sequence
  Description of Artificial Sequence: Synthetic DNA sequence of Thermus thermophilus DNA Polymerase A663T
tctagaggaagcatgagcctcaccctggcagacaaggtggtctacgaggaggagatccagaaaagccgcttcatcgccaaggcggcccccgtggcctcggaggaggaggccttggcgtttttggccgagaaccgggagcctgaggccacccacaacggccacgcctacaagatcggcctcctctaccgcttctctgacgacggggagccctcgggcaccgcaggcaggcccatcctccacgccatagaggcccagggcctggaccgggtggcggtcctggtggtgcgctacttcggcggggtgaagctcggggccggggggcttgtgcgggcctacgggggggtggcggcggaggccttaaggcgggcgcccaaggtccccttggtggagcgggtggggctcgccttcctcgtgcccttcgccgaggtgggccgggtctacgccctcctggaggcccgcgcccctgaaggccgaggagacctacaccccggaggcgtgcgcttcgccctcctcctccccaagcccgagcgggaaggtttcctcagggcgctcctggacgccacccggggacaggtggccctggagtagcatggaggcgatgcttccgctctttgaacccaaaggccgggtcctcctggtggacggccaccacctggcctaccgcaccttcttcgccctgaagggcctcaccacgagccggggcgaaccggtgcaggcggtctacggcttcgccaagagcctcctcaaggccctgaaggaggacgggtacaaggccgtcttcgtggtctttgacgccaaggccccctccttccgccacgaggcctacgaggcctacaaggcggggagggccccgacccccgaggacttcccccggcagctcgccctcatcaaggagctggtggacctcctggggtttacccgcctcgaggtccccggctacgaggcggacgacgttctcgccaccctggccaagaaggcggaaaaggaggggtacgaggtgcgcatcctcaccgccgaccgcgacctctaccaactcgtctccgaccgcgtcgccgtcctccaccccgagggccacctcatcaccccggagtggctttgggagaagtacggcctcaggccggagcagtgggtggacttccgcgccctcgtgggggacccctccgacaacctccccggggtcaagggcatcggggagaagaccgccctcaagctcctcaaggagtggggaagcctggaaaacctcctcaagaacctggaccgggtaaagccagaaaacgtccgggagaagatcaaggcccacctggaagacctcaggctctccttggagctctcccgggtgcgcaccgacctccccctggaggtggacctcgcccaggggcgggagcccgaccgggaggggcttagggccttcctggagaggctggagttcggcagcctcctccacgagttcggcctcctggaggcccccgcccccctggaggaggccccctggcccccgccggaaggggccttcgtgggcttcgtcctctcccgccccgagcccatgtgggcggagcttaaagccctggccgcctgcagggacggccgggtgcaccgggcagcagaccccttggcggggctaaaggacctcaaggaggtccggggcctcctcgccaaggacctcgccgtcttggcctcgagggaggggctagacctcgtgcccggggacgaccccatgctcctcgcctacctcctggacccctccaacaccacccccgagggggtggcgcggcgctacgggggggagtggacggaggacgccgcccaccgggccctcctctcggagaggctccatcggaacctccttaagcgcctcgagggggaggagaagctcctttggctctaccacgaggtggaaaagcccctctcccgggtcctggcccacatggaggccaccggggtacggcgggacgtggcctaccttcaggccctttccctggagcttgcggaggagatccgccgcctcgaggaggaggtcttccgcttggcgggccaccccttcaacctcaactcccgggaccagctggaaagggtgctctttgacgagcttaggcttcccgccttggggaagacgcaaaagacaggcaagcgctccaccagcgccgcggtgctggaggccctacgggaggcccaccccatcgtggagaagatcctccagcaccgggagctcaccaagctcaagaacacctacgtggaccccctcccaagcctcgtccacccgaggacgggccgcctccacacccgcttcaaccagacggccacggccacggggaggcttagtagctccgaccccaacctgcagaacatccccgtccgcacccccttgggccagaggatccgccgggccttcgtggccgaggcgggttgggcgttggtggccctggactatagccagatagagctccgcgtcctcgcccacctctccggggacgaaaacctgatcagggtcttccaggaggggaaggacatccacacccagaccgcaagctggatgttcggcgtccccccggaggccgtggaccccctgatgcgccggactgccaagacggtgaacttcggcgtcctctacggcatgtccgcccataggctctcccaggagcttgccatcccctacgaggaggcggtggcctttatagagcgctacttccaaagcttccccaaggtgcgggcctggatagaaaagaccctggaggaggggaggaagcggggctacgtggaaaccctcttcggaagaaggcgctacgtgcccgacctcaacgcccgggtgaagagcgtcagggaggccgcggagcgcatggccttcaacatgcccgtccagggcaccgccgccgacctcatgaagctcgccatggtgaagctcttcccccgcctccgggagatgggggcccgcatgctcctccaggtccacgacgagctcctcctggaggccccccaagcgcgggccgaggaggtggcggctttggccaaggaggccatggagaaggcctatcccctcgccgtgcccctggaggtggaggtggggatgggggaggactggctttccgccaagggttaggggggccctgccgtttagaggaagttcaaggggttgtccctcagaaacgcctccaggggaacgccctctgggcctaccaggaggcctttagccccaaaggtgcgggtgaaggcttccaggccctggg

SEQ ID NO: 3580 - DNA, 3221 bp, Artificial Sequence
  Description of Artificial Sequence: Synthetic DNA sequence of Thermus thermophilus DNA Polymerase A663W
tctagaggaagcatgagcctcaccctggcagacaaggtggtctacgaggaggagatccagaaaagccgcttcatcgccaaggcggcccccgtggcctcggaggaggaggccttggcgtttttggccgagaaccgggagcctgaggccacccacaacggccacgcctacaagatcggcctcctctaccgcttctctgacgacggggagccctcgggcaccgcaggcaggcccatcctccacgccatagaggcccagggcctggaccgggtggcggtcctggtggtgcgctacttcggcggggtgaagctcggggccggggggcttgtgcgggcctacgggggggtggcggcggaggccttaaggcgggcgcccaaggtccccttggtggagcgggtggggctcgccttcctcgtgcccttcgccgaggtgggccgggtctacgccctcctggaggcccgcgcccctgaaggccgaggagacctacaccccggaggcgtgcgcttcgccctcctcctccccaagcccgagcgggaaggtttcctcagggcgctcctggacgccacccggggacaggtggccctggagtagcatggaggcgatgcttccgctctttgaacccaaaggccgggtcctcctggtggacggccaccacctggcctaccgcaccttcttcgccctgaagggcctcaccacgagccggggcgaaccggtgcaggcggtctacggcttcgccaagagcctcctcaaggccctgaaggaggacgggtacaaggccgtcttcgtggtctttgacgccaaggccccctccttccgccacgaggcctacgaggcctacaaggcggggagggccccgacccccgaggacttcccccggcagctcgccctcatcaaggagctggtggacctcctggggtttacccgcctcgaggtccccggctacgaggcggacgacgttctcgccaccctggccaagaaggcggaaaaggaggggtacgaggtgcgcatcctcaccgccgaccgcgacctctaccaactcgtctccgaccgcgtcgccgtcctccaccccgagggccacctcatcaccccggagtggctttgggagaagtacggcctcaggccggagcagtgggtggacttccgcgccctcgtgggggacccctccgacaacctccccggggtcaagggcatcggggagaagaccgccctcaagctcctcaaggagtggggaagcctggaaaacctcctcaagaacctggaccgggtaaagccagaaaacgtccgggagaagatcaaggcccacctggaagacctcaggctctccttggagctctcccgggtgcgcaccgacctccccctggaggtggacctcgcccaggggcgggagcccgaccgggaggggcttagggccttcctggagaggctggagttcggcagcctcctccacgagttcggcctcctggaggcccccgcccccctggaggaggccccctggcccccgccggaaggggccttcgtgggcttcgtcctctcccgccccgagcccatgtgggcggagcttaaagccctggccgcctgcagggacggccgggtgcaccgggcagcagaccccttggcggggctaaaggacctcaaggaggtccggggcctcctcgccaaggacctcgccgtcttggcctcgagggaggggctagacctcgtgcccggggacgaccccatgctcctcgcctacctcctggacccctccaacaccacccccgagggggtggcgcggcgctacgggggggagtggacggaggacgccgcccaccgggccctcctctcggagaggctccatcggaacctccttaagcgcctcgagggggaggagaagctcctttggctctaccacgaggtggaaaagcccctctcccgggtcctggcccacatggaggccaccggggtacggcgggacgtggcctaccttcaggccctttccctggagcttgcggaggagatccgccgcctcgaggaggaggtcttccgcttggcgggccaccccttcaacctcaactcccgggaccagctggaaagggtgctctttgacgagcttaggcttcccgccttggggaagacgcaaaagacaggcaagcgctccaccagcgccgcggtgctggaggccctacgggaggcccaccccatcgtggagaagatcctccagcaccgggagctcaccaagctcaagaacacctacgtggaccccctcccaagcctcgtccacccgaggacgggccgcctccacacccgcttcaaccagacggccacggccacggggaggcttagtagctccgaccccaacctgcagaacatccccgtccgcacccccttgggccagaggatccgccgggccttcgtggccgaggcgggttgggcgttggtggccctggactatagccagatagagctccgcgtcctcgcccacctctccggggacgaaaacctgatcagggtcttccaggaggggaaggacatccacacccagaccgcaagctggatgttcggcgtccccccggaggccgtggaccccctgatgcgccggtgggccaagacggtgaacttcggcgtcctctacggcatgtccgcccataggctctcccaggagcttgccatcccctacgaggaggcggtggcctttatagagcgctacttccaaagcttccccaaggtgcgggcctggatagaaaagaccctggaggaggggaggaagcggggctacgtggaaaccctcttcggaagaaggcgctacgtgcccgacctcaacgcccgggtgaagagcgtcagggaggccgcggagcgcatggccttcaacatgcccgtccagggcaccgccgccgacctcatgaagctcgccatggtgaagctcttcccccgcctccgggagatgggggcccgcatgctcctccaggtccacgacgagctcctcctggaggccccccaagcgcgggccgaggaggtggcggctttggccaaggaggccatggagaaggcctatcccctcgccgtgcccctggaggtggaggtggggatgggggaggactggctttccgccaagggttaggggggccctgccgtttagaggaagttcaaggggttgtccctcagaaacgcctccaggggaacgccctctgggcctaccaggaggcctttagccccaaaggtgcgggtgaaggcttccaggccctggg

SEQ ID NO: 3581 - DNA, 3221 bp, Artificial Sequence
  Description of Artificial Sequence: Synthetic DNA sequence of Thermus thermophilus DNA Polymerase A663Y
tctagaggaagcatgagcctcaccctggcagacaaggtggtctacgaggaggagatccagaaaagccgcttcatcgccaaggcggcccccgtggcctcggaggaggaggccttggcgtttttggccgagaaccgggagcctgaggccacccacaacggccacgcctacaagatcggcctcctctaccgcttctctgacgacggggagccctcgggcaccgcaggcaggcccatcctccacgccatagaggcccagggcctggaccgggtggcggtcctggtggtgcgctacttcggcggggtgaagctcggggccggggggcttgtgcgggcctacgggggggtggcggcggaggccttaaggcgggcgcccaaggtccccttggtggagcgggtggggctcgccttcctcgtgcccttcgccgaggtgggccgggtctacgccctcctggaggcccgcgcccctgaaggccgaggagacctacaccccggaggcgtgcgcttcgccctcctcctccccaagcccgagcgggaaggtttcctcagggcgctcctggacgccacccggggacaggtggccctggagtagcatggaggcgatgcttccgctctttgaacccaaaggccgggtcctcctggtggacggccaccacctggcctaccgcaccttcttcgccctgaagggcctcaccacgagccggggcgaaccggtgcaggcggtctacggcttcgccaagagcctcctcaaggccctgaaggaggacgggtacaaggccgtcttcgtggtctttgacgccaaggccccctccttccgccacgaggcctacgaggcctacaaggcggggagggccccgacccccgaggacttcccccggcagctcgccctcatcaaggagctggtggacctcctggggtttacccgcctcgaggtccccggctacgaggcggacgacgttctcgccaccctggccaagaaggcggaaaaggaggggtacgaggtgcgcatcctcaccgccgaccgcgacctctaccaactcgtctccgaccgcgtcgccgtcctccaccccgagggccacctcatcaccccggagtggctttgggagaagtacggcctcaggccggagcagtgggtggacttccgcgccctcgtgggggacccctccgacaacctccccggggtcaagggcatcggggagaagaccgccctcaagctcctcaaggagtggggaagcctggaaaacctcctcaagaacctggaccgggtaaagccagaaaacgtccgggagaagatcaaggcccacctggaagacctcaggctctccttggagctctcccgggtgcgcaccgacctccccctggaggtggacctcgcccaggggcgggagcccgaccgggaggggcttagggccttcctggagaggctggagttcggcagcctcctccacgagttcggcctcctggaggcccccgcccccctggaggaggccccctggcccccgccggaaggggccttcgtgggcttcgtcctctcccgccccgagcccatgtgggcggagcttaaagccctggccgcctgcagggacggccgggtgcaccgggcagcagaccccttggcggggctaaaggacctcaaggaggtccggggcctcctcgccaaggacctcgccgtcttggcctcgagggaggggctagacctcgtgcccggggacgaccccatgctcctcgcctacctcctggacccctccaacaccacccccgagggggtggcgcggcgctacgggggggagtggacggaggacgccgcccaccgggccctcctctcggagaggctccatcggaacctccttaagcgcctcgagggggaggagaagctcctttggctctaccacgaggtggaaaagcccctctcccgggtcctggcccacatggaggccaccggggtacggcgggacgtggcctaccttcaggccctttccctggagcttgcggaggagatccgccgcctcgaggaggaggtcttccgcttggcgggccaccccttcaacctcaactcccgggaccagctggaaagggtgctctttgacgagcttaggcttcccgccttggggaagacgcaaaagacaggcaagcgctccaccagcgccgcggtgctggaggccctacgggaggcccaccccatcgtggagaagatcctccagcaccgggagctcaccaagctcaagaacacctacgtggaccccctcccaagcctcgtccacccgaggacgggccgcctccacacccgcttcaaccagacggccacggccacggggaggcttagtagctccgaccccaacctgcagaacatccccgtccgcacccccttgggccagaggatccgccgggccttcgtggccgaggcgggttgggcgttggtggccctggactatagccagatagagctccgcgtcctcgcccacctctccggggacgaaaacctgatcagggtcttccaggaggggaaggacatccacacccagaccgcaagctggatgttcggcgtccccccggaggccgtggaccccctgatgcgccggtatgccaagacggtgaacttcggcgtcctctacggcatgtccgcccataggctctcccaggagcttgccatcccctacgaggaggcggtggcctttatagagcgctacttccaaagcttccccaaggtgcgggcctggatagaaaagaccctggaggaggggaggaagcggggctacgtggaaaccctcttcggaagaaggcgctacgtgcccgacctcaacgcccgggtgaagagcgtcagggaggccgcggagcgcatggccttcaacatgcccgtccagggcaccgccgccgacctcatgaagctcgccatggtgaagctcttcccccgcctccgggagatgggggcccgcatgctcctccaggtccacgacgagctcctcctggaggccccccaagcgcgggccgaggaggtggcggctttggccaaggaggccatggagaaggcctatcccctcgccgtgcccctggaggtggaggtggggatgggggaggactggctttccgccaagggttaggggggccctgccgtttagaggaagttcaaggggttgtccctcagaaacgcctccaggggaacgccctctgggcctaccaggaggcctttagccccaaaggtgcgggtgaaggcttccaggccctggg

SEQ ID NO: 3582 - DNA, 3221 bp, Artificial Sequence
  Description of Artificial Sequence: Synthetic DNA sequence of Thermus thermophilus DNA Polymerase A663V
tctagaggaagcatgagcctcaccctggcagacaaggtggtctacgaggaggagatccagaaaagccgcttcatcgccaaggcggcccccgtggcctcggaggaggaggccttggcgtttttggccgagaaccgggagcctgaggccacccacaacggccacgcctacaagatcggcctcctctaccgcttctctgacgacggggagccctcgggcaccgcaggcaggcccatcctccacgccatagaggcccagggcctggaccgggtggcggtcctggtggtgcgctacttcggcggggtgaagctcggggccggggggcttgtgcgggcctacgggggggtggcggcggaggccttaaggcgggcgcccaaggtccccttggtggagcgggtggggctcgccttcctcgtgcccttcgccgaggtgggccgggtctacgccctcctggaggcccgcgcccctgaaggccgaggagacctacaccccggaggcgtgcgcttcgccctcctcctccccaagcccgagcgggaaggtttcctcagggcgctcctggacgccacccggggacaggtggccctggagtagcatggaggcgatgcttccgctctttgaacccaaaggccgggtcctcctggtggacggccaccacctggcctaccgcaccttcttcgccctgaagggcctcaccacgagccggggcgaaccggtgcaggcggtctacggcttcgccaagagcctcctcaaggccctgaaggaggacgggtacaaggccgtcttcgtggtctttgacgccaaggccccctccttccgccacgaggcctacgaggcctacaaggcggggagggccccgacccccgaggacttcccccggcagctcgccctcatcaaggagctggtggacctcctggggtttacccgcctcgaggtccccggctacgaggcggacgacgttctcgccaccctggccaagaaggcggaaaaggaggggtacgaggtgcgcatcctcaccgccgaccgcgacctctaccaactcgtctccgaccgcgtcgccgtcctccaccccgagggccacctcatcaccccggagtggctttgggagaagtacggcctcaggccggagcagtgggtggacttccgcgccctcgtgggggacccctccgacaacctccccggggtcaagggcatcggggagaagaccgccctcaagctcctcaaggagtggggaagcctggaaaacctcctcaagaacctggaccgggtaaagccagaaaacgtccgggagaagatcaaggcccacctggaagacctcaggctctccttggagctctcccgggtgcgcaccgacctccccctggaggtggacctcgcccaggggcgggagcccgaccgggaggggcttagggccttcctggagaggctggagttcggcagcctcctccacgagttcggcctcctggaggcccccgcccccctggaggaggccccctggcccccgccggaaggggccttcgtgggcttcgtcctctcccgccccgagcccatgtgggcggagcttaaagccctggccgcctgcagggacggccgggtgcaccgggcagcagaccccttggcggggctaaaggacctcaaggaggtccggggcctcctcgccaaggacctcgccgtcttggcctcgagggaggggctagacctcgtgcccggggacgaccccatgctcctcgcctacctcctggacccctccaacaccacccccgagggggtggcgcggcgctacgggggggagtggacggaggacgccgcccaccgggccctcctctcggagaggctccatcggaacctccttaagcgcctcgagggggaggagaagctcctttggctctaccacgaggtggaaaagcccctctcccgggtcctggcccacatggaggccaccggggtacggcgggacgtggcctaccttcaggccctttccctggagcttgcggaggagatccgccgcctcgaggaggaggtcttccgcttggcgggccaccccttcaacctcaactcccgggaccagctggaaagggtgctctttgacgagcttaggcttcccgccttggggaagacgcaaaagacaggcaagcgctccaccagcgccgcggtgctggaggccctacgggaggcccaccccatcgtggagaagatcctccagcaccgggagctcaccaagctcaagaacacctacgtggaccccctcccaagcctcgtccacccgaggacgggccgcctccacacccgcttcaaccagacggccacggccacggggaggcttagtagctccgaccccaacctgcagaacatccccgtccgcacccccttgggccagaggatccgccgggccttcgtggccgaggcgggttgggcgttggtggccctggactatagccagatagagctccgcgtcctcgcccacctctccggggacgaaaacctgatcagggtcttccaggaggggaaggacatccacacccagaccgcaagctggatgttcggcgtccccccggaggccgtggaccccctgatgcgccgggttgccaagacggtgaacttcggcgtcctctacggcatgtccgcccataggctctcccaggagcttgccatcccctacgaggaggcggtggcctttatagagcgctacttccaaagcttccccaaggtgcgggcctggatagaaaagaccctggaggaggggaggaagcggggctacgtggaaaccctcttcggaagaaggcgctacgtgcccgacctcaacgcccgggtgaagagcgtcagggaggccgcggagcgcatggccttcaacatgcccgtccagggcaccgccgccgacctcatgaagctcgccatggtgaagctcttcccccgcctccgggagatgggggcccgcatgctcctccaggtccacgacgagctcctcctggaggccccccaagcgcgggccgaggaggtggcggctttggccaaggaggccatggagaaggcctatcccctcgccgtgcccctggaggtggaggtggggatgggggaggactggctttccgccaagggttaggggggccctgccgtttagaggaagttcaaggggttgtccctcagaaacgcctccaggggaacgccctctgggcctaccaggaggcctttagccccaaaggtgcgggtgaaggcttccaggccctggg

SEQ ID NO: 3583 - DNA, 3221 bp, Artificial Sequence
  Description of Artificial Sequence: Synthetic DNA sequence of Thermus thermophilus DNA Polymerase K740A
tctagaggaagcatgagcctcaccctggcagacaaggtggtctacgaggaggagatccagaaaagccgcttcatcgccaaggcggcccccgtggcctcggaggaggaggccttggcgtttttggccgagaaccgggagcctgaggccacccacaacggccacgcctacaagatcggcctcctctaccgcttctctgacgacggggagccctcgggcaccgcaggcaggcccatcctccacgccatagaggcccagggcctggaccgggtggcggtcctggtggtgcgctacttcggcggggtgaagctcggggccggggggcttgtgcgggcctacgggggggtggcggcggaggccttaaggcgggcgcccaaggtccccttggtggagcgggtggggctcgccttcctcgtgcccttcgccgaggtgggccgggtctacgccctcctggaggcccgcgcccctgaaggccgaggagacctacaccccggaggcgtgcgcttcgccctcctcctccccaagcccgagcgggaaggtttcctcagggcgctcctggacgccacccggggacaggtggccctggagtagcatggaggcgatgcttccgctctttgaacccaaaggccgggtcctcctggtggacggccaccacctggcctaccgcaccttcttcgccctgaagggcctcaccacgagccggggcgaaccggtgcaggcggtctacggcttcgccaagagcctcctcaaggccctgaaggaggacgggtacaaggccgtcttcgtggtctttgacgccaaggccccctccttccgccacgaggcctacgaggcctacaaggcggggagggccccgacccccgaggacttcccccggcagctcgccctcatcaaggagctggtggacctcctggggtttacccgcctcgaggtccccggctacgaggcggacgacgttctcgccaccctggccaagaaggcggaaaaggaggggtacgaggtgcgcatcctcaccgccgaccgcgacctctaccaactcgtctccgaccgcgtcgccgtcctccaccccgagggccacctcatcaccccggagtggctttgggagaagtacggcctcaggccggagcagtgggtggacttccgcgccctcgtgggggacccctccgacaacctccccggggtcaagggcatcggggagaagaccgccctcaagctcctcaaggagtggggaagcctggaaaacctcctcaagaacctggaccgggtaaagccagaaaacgtccgggagaagatcaaggcccacctggaagacctcaggctctccttggagctctcccgggtgcgcaccgacctccccctggaggtggacctcgcccaggggcgggagcccgaccgggaggggcttagggccttcctggagaggctggagttcggcagcctcctccacgagttcggcctcctggaggcccccgcccccctggaggaggccccctggcccccgccggaaggggccttcgtgggcttcgtcctctcccgccccgagcccatgtgggcggagcttaaagccctggccgcctgcagggacggccgggtgcaccgggcagcagaccccttggcggggctaaaggacctcaaggaggtccggggcctcctcgccaaggacctcgccgtcttggcctcgagggaggggctagacctcgtgcccggggacgaccccatgctcctcgcctacctcctggacccctccaacaccacccccgagggggtggcgcggcgctacgggggggagtggacggaggacgccgcccaccgggccctcctctcggagaggctccatcggaacctccttaagcgcctcgagggggaggagaagctcctttggctctaccacgaggtggaaaagcccctctcccgggtcctggcccacatggaggccaccggggtacggcgggacgtggcctaccttcaggccctttccctggagcttgcggaggagatccgccgcctcgaggaggaggtcttccgcttggcgggccaccccttcaacctcaactcccgggaccagctggaaagggtgctctttgacgagcttaggcttcccgccttggggaagacgcaaaagacaggcaagcgctccaccagcgccgcggtgctggaggccctacgggaggcccaccccatcgtggagaagatcctccagcaccgggagctcaccaagctcaagaacacctacgtggaccccctcccaagcctcgtccacccgaggacgggccgcctccacacccgcttcaaccagacggccacggccacggggaggcttagtagctccgaccccaacctgcagaacatccccgtccgcacccccttgggccagaggatccgccgggccttcgtggccgaggcgggttgggcgttggtggccctggactatagccagatagagctccgcgtcctcgcccacctctccggggacgaaaacctgatcagggtcttccaggaggggaaggacatccacacccagaccgcaagctggatgttcggcgtccccccggaggccgtggaccccctgatgcgccgggcggccaagacggtgaacttcggcgtcctctacggcatgtccgcccataggctctcccaggagcttgccatcccctacgaggaggcggtggcctttatagagcgctacttccaaagcttccccaaggtgcgggcctggatagaaaagaccctggaggaggggaggaagcggggctacgtggaaaccctcttcggaagaaggcgctacgtgcccgacctcaacgcccgggtggctagcgtcagggaggccgcggagcgcatggccttcaacatgcccgtccagggcaccgccgccgacctcatgaagctcgccatggtgaagctcttcccccgcctccgggagatgggggcccgcatgctcctccaggtccacgacgagctcctcctggaggccccccaagcgcgggccgaggaggtggcggctttggccaaggaggccatggagaaggcctatcccctcgccgtgcccctggaggtggaggtggggatgggggaggactggctttccgccaagggttaggggggccctgccgtttagaggaagttcaaggggttgtccctcagaaacgcctccaggggaacgccctctgggcctaccaggaggcctttagccccaaaggtgcgggtgaaggcttccaggccctggg

SEQ ID NO: 3584 - DNA, 3221 bp, Artificial Sequence
  Description of Artificial Sequence: Synthetic DNA sequence of Thermus thermophilus DNA Polymerase K740R
tctagaggaagcatgagcctcaccctggcagacaaggtggtctacgaggaggagatccagaaaagccgcttcatcgccaaggcggcccccgtggcctcggaggaggaggccttggcgtttttggccgagaaccgggagcctgaggccacccacaacggccacgcctacaagatcggcctcctctaccgcttctctgacgacggggagccctcgggcaccgcaggcaggcccatcctccacgccatagaggcccagggcctggaccgggtggcggtcctggtggtgcgctacttcggcggggtgaagctcggggccggggggcttgtgcgggcctacgggggggtggcggcggaggccttaaggcgggcgcccaaggtccccttggtggagcgggtggggctcgccttcctcgtgcccttcgccgaggtgggccgggtctacgccctcctggaggcccgcgcccctgaaggccgaggagacctacaccccggaggcgtgcgcttcgccctcctcctccccaagcccgagcgggaaggtttcctcagggcgctcctggacgccacccggggacaggtggccctggagtagcatggaggcgatgcttccgctctttgaacccaaaggccgggtcctcctggtggacggccaccacctggcctaccgcaccttcttcgccctgaagggcctcaccacgagccggggcgaaccggtgcaggcggtctacggcttcgccaagagcctcctcaaggccctgaaggaggacgggtacaaggccgtcttcgtggtctttgacgccaaggccccctccttccgccacgaggcctacgaggcctacaaggcggggagggccccgacccccgaggacttcccccggcagctcgccctcatcaaggagctggtggacctcctggggtttacccgcctcgaggtccccggctacgaggcggacgacgttctcgccaccctggccaagaaggcggaaaaggaggggtacgaggtgcgcatcctcaccgccgaccgcgacctctaccaactcgtctccgaccgcgtcgccgtcctccaccccgagggccacctcatcaccccggagtggctttgggagaagtacggcctcaggccggagcagtgggtggacttccgcgccctcgtgggggacccctccgacaacctccccggggtcaagggcatcggggagaagaccgccctcaagctcctcaaggagtggggaagcctggaaaacctcctcaagaacctggaccgggtaaagccagaaaacgtccgggagaagatcaaggcccacctggaagacctcaggctctccttggagctctcccgggtgcgcaccgacctccccctggaggtggacctcgcccaggggcgggagcccgaccgggaggggcttagggccttcctggagaggctggagttcggcagcctcctccacgagttcggcctcctggaggcccccgcccccctggaggaggccccctggcccccgccggaaggggccttcgtgggcttcgtcctctcccgccccgagcccatgtgggcggagcttaaagccctggccgcctgcagggacggccgggtgcaccgggcagcagaccccttggcggggctaaaggacctcaaggaggtccggggcctcctcgccaaggacctcgccgtcttggcctcgagggaggggctagacctcgtgcccggggacgaccccatgctcctcgcctacctcctggacccctccaacaccacccccgagggggtggcgcggcgctacgggggggagtggacggaggacgccgcccaccgggccctcctctcggagaggctccatcggaacctccttaagcgcctcgagggggaggagaagctcctttggctctaccacgaggtggaaaagcccctctcccgggtcctggcccacatggaggccaccggggtacggcgggacgtggcctaccttcaggccctttccctggagcttgcggaggagatccgccgcctcgaggaggaggtcttccgcttggcgggccaccccttcaacctcaactcccgggaccagctggaaagggtgctctttgacgagcttaggcttcccgccttggggaagacgcaaaagacaggcaagcgctccaccagcgccgcggtgctggaggccctacgggaggcccaccccatcgtggagaagatcctccagcaccgggagctcaccaagctcaagaacacctacgtggaccccctcccaagcctcgtccacccgaggacgggccgcctccacacccgcttcaaccagacggccacggccacggggaggcttagtagctccgaccccaacctgcagaacatccccgtccgcacccccttgggccagaggatccgccgggccttcgtggccgaggcgggttgggcgttggtggccctggactatagccagatagagctccgcgtcctcgcccacctctccggggacgaaaacctgatcagggtcttccaggaggggaaggacatccacacccagaccgcaagctggatgttcggcgtccccccggaggccgtggaccccctgatgcgccgggcggccaagacggtgaacttcggcgtcctctacggcatgtccgcccataggctctcccaggagcttgccatcccctacgaggaggcggtggcctttatagagcgctacttccaaagcttccccaaggtgcgggcctggatagaaaagaccctggaggaggggaggaagcggggctacgtggaaaccctcttcggaagaaggcgctacgtgcccgacctcaacgcccgggtgcgaagcgtcagggaggccgcggagcgcatggccttcaacatgcccgtccagggcaccgccgccgacctcatgaagctcgccatggtgaagctcttcccccgcctccgggagatgggggcccgcatgctcctccaggtccacgacgagctcctcctggaggccccccaagcgcgggccgaggaggtggcggctttggccaaggaggccatggagaaggcctatcccctcgccgtgcccctggaggtggaggtggggatgggggaggactggctttccgccaagggttaggggggccctgccgtttagaggaagttcaaggggttgtccctcagaaacgcctccaggggaacgccctctgggcctaccaggaggcctttagccccaaaggtgcgggtgaaggcttccaggccctggg

SEQ ID NO: 3585 - DNA, 3221 bp, Artificial Sequence
  Description of Artificial Sequence: Synthetic DNA sequence of Thermus thermophilus DNA Polymerase K740C
tctagaggaagcatgagcctcaccctggcagacaaggtggtctacgaggaggagatccagaaaagccgcttcatcgccaaggcggcccccgtggcctcggaggaggaggccttggcgtttttggccgagaaccgggagcctgaggccacccacaacggccacgcctacaagatcggcctcctctaccgcttctctgacgacggggagccctcgggcaccgcaggcaggcccatcctccacgccatagaggcccagggcctggaccgggtggcggtcctggtggtgcgctacttcggcggggtgaagctcggggccggggggcttgtgcgggcctacgggggggtggcggcggaggccttaaggcgggcgcccaaggtccccttggtggagcgggtggggctcgccttcctcgtgcccttcgccgaggtgggccgggtctacgccctcctggaggcccgcgcccctgaaggccgaggagacctacaccccggaggcgtgcgcttcgccctcctcctccccaagcccgagcgggaaggtttcctcagggcgctcctggacgccacccggggacaggtggccctggagtagcatggaggcgatgcttccgctctttgaacccaaaggccgggtcctcctggtggacggccaccacctggcctaccgcaccttcttcgccctgaagggcctcaccacgagccggggcgaaccggtgcaggcggtctacggcttcgccaagagcctcctcaaggccctgaaggaggacgggtacaaggccgtcttcgtggtctttgacgccaaggccccctccttccgccacgaggcctacgaggcctacaaggcggggagggccccgacccccgaggacttcccccggcagctcgccctcatcaaggagctggtggacctcctggggtttacccgcctcgaggtccccggctacgaggcggacgacgttctcgccaccctggccaagaaggcggaaaaggaggggtacgaggtgcgcatcctcaccgccgaccgcgacctctaccaactcgtctccgaccgcgtcgccgtcctccaccccgagggccacctcatcaccccggagtggctttgggagaagtacggcctcaggccggagcagtgggtggacttccgcgccctcgtgggggacccctccgacaacctccccggggtcaagggcatcggggagaagaccgccctcaagctcctcaaggagtggggaagcctggaaaacctcctcaagaacctggaccgggtaaagccagaaaacgtccgggagaagatcaaggcccacctggaagacctcaggctctccttggagctctcccgggtgcgcaccgacctccccctggaggtggacctcgcccaggggcgggagcccgaccgggaggggcttagggccttcctggagaggctggagttcggcagcctcctccacgagttcggcctcctggaggcccccgcccccctggaggaggccccctggcccccgccggaaggggccttcgtgggcttcgtcctctcccgccccgagcccatgtgggcggagcttaaagccctggccgcctgcagggacggccgggtgcaccgggcagcagaccccttggcggggctaaaggacctcaaggaggtccggggcctcctcgccaaggacctcgccgtcttggcctcgagggaggggctagacctcgtgcccggggacgaccccatgctcctcgcctacctcctggacccctccaacaccacccccgagggggtggcgcggcgctacgggggggagtggacggaggacgccgcccaccgggccctcctctcggagaggctccatcggaacctccttaagcgcctcgagggggaggagaagctcctttggctctaccacgaggtggaaaagcccctctcccgggtcctggcccacatggaggccaccggggtacggcgggacgtggcctaccttcaggccctttccctggagcttgcggaggagatccgccgcctcgaggaggaggtcttccgcttggcgggccaccccttcaacctcaactcccgggaccagctggaaagggtgctctttgacgagcttaggcttcccgccttggggaagacgcaaaagacaggcaagcgctccaccagcgccgcggtgctggaggccctacgggaggcccaccccatcgtggagaagatcctccagcaccgggagctcaccaagctcaagaacacctacgtggaccccctcccaagcctcgtccacccgaggacgggccgcctccacacccgcttcaaccagacggccacggccacggggaggcttagtagctccgaccccaacctgcagaacatccccgtccgcacccccttgggccagaggatccgccgggccttcgtggccgaggcgggttgggcgttggtggccctggactatagccagatagagctccgcgtcctcgcccacctctccggggacgaaaacctgatcagggtcttccaggaggggaaggacatccacacccagaccgcaagctggatgttcggcgtccccccggaggccgtggaccccctgatgcgccgggcggccaagacggtgaacttcggcgtcctctacggcatgtccgcccataggctctcccaggagcttgccatcccctacgaggaggcggtggcctttatagagcgctacttccaaagcttccccaaggtgcgggcctggatagaaaagaccctggaggaggggaggaagcggggctacgtggaaaccctcttcggaagaaggcgctacgtgcccgacctcaacgcccgggtgtgtagcgtcagggaggccgcggagcgcatggccttcaacatgcccgtccagggcaccgccgccgacctcatgaagctcgccatggtgaagctcttcccccgcctccgggagatgggggcccgcatgctcctccaggtccacgacgagctcctcctggaggccccccaagcgcgggccgaggaggtggcggctttggccaaggaggccatggagaaggcctatcccctcgccgtgcccctggaggtggaggtggggatgggggaggactggctttccgccaagggttaggggggccctgccgtttagaggaagttcaaggggttgtccctcagaaacgcctccaggggaacgccctctgggcctaccaggaggcctttagccccaaaggtgcgggtgaaggcttccaggccctggg

SEQ ID NO: 3586 - DNA, 3221 bp, Artificial Sequence
  Description of Artificial Sequence: Synthetic DNA sequence of Thermus thermophilus DNA Polymerase K740G
tctagaggaagcatgagcctcaccctggcagacaaggtggtctacgaggaggagatccagaaaagccgcttcatcgccaaggcggcccccgtggcctcggaggaggaggccttggcgtttttggccgagaaccgggagcctgaggccacccacaacggccacgcctacaagatcggcctcctctaccgcttctctgacgacggggagccctcgggcaccgcaggcaggcccatcctccacgccatagaggcccagggcctggaccgggtggcggtcctggtggtgcgctacttcggcggggtgaagctcggggccggggggcttgtgcgggcctacgggggggtggcggcggaggccttaaggcgggcgcccaaggtccccttggtggagcgggtggggctcgccttcctcgtgcccttcgccgaggtgggccgggtctacgccctcctggaggcccgcgcccctgaaggccgaggagacctacaccccggaggcgtgcgcttcgccctcctcctccccaagcccgagcgggaaggtttcctcagggcgctcctggacgccacccggggacaggtggccctggagtagcatggaggcgatgcttccgctctttgaacccaaaggccgggtcctcctggtggacggccaccacctggcctaccgcaccttcttcgccctgaagggcctcaccacgagccggggcgaaccggtgcaggcggtctacggcttcgccaagagcctcctcaaggccctgaaggaggacgggtacaaggccgtcttcgtggtctttgacgccaaggccccctccttccgccacgaggcctacgaggcctacaaggcggggagggccccgacccccgaggacttcccccggcagctcgccctcatcaaggagctggtggacctcctggggtttacccgcctcgaggtccccggctacgaggcggacgacgttctcgccaccctggccaagaaggcggaaaaggaggggtacgaggtgcgcatcctcaccgccgaccgcgacctctaccaactcgtctccgaccgcgtcgccgtcctccaccccgagggccacctcatcaccccggagtggctttgggagaagtacggcctcaggccggagcagtgggtggacttccgcgccctcgtgggggacccctccgacaacctccccggggtcaagggcatcggggagaagaccgccctcaagctcctcaaggagtggggaagcctggaaaacctcctcaagaacctggaccgggtaaagccagaaaacgtccgggagaagatcaaggcccacctggaagacctcaggctctccttggagctctcccgggtgcgcaccgacctccccctggaggtggacctcgcccaggggcgggagcccgaccgggaggggcttagggccttcctggagaggctggagttcggcagcctcctccacgagttcggcctcctggaggcccccgcccccctggaggaggccccctggcccccgccggaaggggccttcgtgggcttcgtcctctcccgccccgagcccatgtgggcggagcttaaagccctggccgcctgcagggacggccgggtgcaccgggcagcagaccccttggcggggctaaaggacctcaaggaggtccggggcctcctcgccaaggacctcgccgtcttggcctcgagggaggggctagacctcgtgcccggggacgaccccatgctcctcgcctacctcctggacccctccaacaccacccccgagggggtggcgcggcgctacgggggggagtggacggaggacgccgcccaccgggccctcctctcggagaggctccatcggaacctccttaagcgcctcgagggggaggagaagctcctttggctctaccacgaggtggaaaagcccctctcccgggtcctggcccacatggaggccaccggggtacggcgggacgtggcctaccttcaggccctttccctggagcttgcggaggagatccgccgcctcgaggaggaggtcttccgcttggcgggccaccccttcaacctcaactcccgggaccagctggaaagggtgctctttgacgagcttaggcttcccgccttggggaagacgcaaaagacaggcaagcgctccaccagcgccgcggtgctggaggccctacgggaggcccaccccatcgtggagaagatcctccagcaccgggagctcaccaagctcaagaacacctacgtggaccccctcccaagcctcgtccacccgaggacgggccgcctccacacccgcttcaaccagacggccacggccacggggaggcttagtagctccgaccccaacctgcagaacatccccgtccgcacccccttgggccagaggatccgccgggccttcgtggccgaggcgggttgggcgttggtggccctggactatagccagatagagctccgcgtcctcgcccacctctccggggacgaaaacctgatcagggtcttccaggaggggaaggacatccacacccagaccgcaagctggatgttcggcgtccccccggaggccgtggaccccctgatgcgccgggcggccaagacggtgaacttcggcgtcctctacggcatgtccgcccataggctctcccaggagcttgccatcccctacgaggaggcggtggcctttatagagcgctacttccaaagcttccccaaggtgcgggcctggatagaaaagaccctggaggaggggaggaagcggggctacgtggaaaccctcttcggaagaaggcgctacgtgcccgacctcaacgcccgggtgggtagcgtcagggaggccgcggagcgcatggccttcaacatgcccgtccagggcaccgccgccgacctcatgaagctcgccatggtgaagctcttcccccgcctccgggagatgggggcccgcatgctcctccaggtccacgacgagctcctcctggaggccccccaagcgcgggccgaggaggtggcggctttggccaaggaggccatggagaaggcctatcccctcgccgtgcccctggaggtggaggtggggatgggggaggactggctttccgccaagggttaggggggccctgccgtttagaggaagttcaaggggttgtccctcagaaacgcctccaggggaacgccctctgggcctaccaggaggcctttagccccaaaggtgcgggtgaaggcttccaggccctggg

SEQ ID NO: 3587 - DNA, 3221 bp, Artificial Sequence
  Description of Artificial Sequence: Synthetic DNA sequence of Thermus thermophilus DNA Polymerase K740Q
tctagaggaagcatgagcctcaccctggcagacaaggtggtctacgaggaggagatccagaaaagccgcttcatcgccaaggcggcccccgtggcctcggaggaggaggccttggcgtttttggccgagaaccgggagcctgaggccacccacaacggccacgcctacaagatcggcctcctctaccgcttctctgacgacggggagccctcgggcaccgcaggcaggcccatcctccacgccatagaggcccagggcctggaccgggtggcggtcctggtggtgcgctacttcggcggggtgaagctcggggccggggggcttgtgcgggcctacgggggggtggcggcggaggccttaaggcgggcgcccaaggtccccttggtggagcgggtggggctcgccttcctcgtgcccttcgccgaggtgggccgggtctacgccctcctggaggcccgcgcccctgaaggccgaggagacctacaccccggaggcgtgcgcttcgccctcctcctccccaagcccgagcgggaaggtttcctcagggcgctcctggacgccacccggggacaggtggccctggagtagcatggaggcgatgcttccgctctttgaacccaaaggccgggtcctcctggtggacggccaccacctggcctaccgcaccttcttcgccctgaagggcctcaccacgagccggggcgaaccggtgcaggcggtctacggcttcgccaagagcctcctcaaggccctgaaggaggacgggtacaaggccgtcttcgtggtctttgacgccaaggccccctccttccgccacgaggcctacgaggcctacaaggcggggagggccccgacccccgaggacttcccccggcagctcgccctcatcaaggagctggtggacctcctggggtttacccgcctcgaggtccccggctacgaggcggacgacgttctcgccaccctggccaagaaggcggaaaaggaggggtacgaggtgcgcatcctcaccgccgaccgcgacctctaccaactcgtctccgaccgcgtcgccgtcctccaccccgagggccacctcatcaccccggagtggctttgggagaagtacggcctcaggccggagcagtgggtggacttccgcgccctcgtgggggacccctccgacaacctccccggggtcaagggcatcggggagaagaccgccctcaagctcctcaaggagtggggaagcctggaaaacctcctcaagaacctggaccgggtaaagccagaaaacgtccgggagaagatcaaggcccacctggaagacctcaggctctccttggagctctcccgggtgcgcaccgacctccccctggaggtggacctcgcccaggggcgggagcccgaccgggaggggcttagggccttcctggagaggctggagttcggcagcctcctccacgagttcggcctcctggaggcccccgcccccctggaggaggccccctggcccccgccggaaggggccttcgtgggcttcgtcctctcccgccccgagcccatgtgggcggagcttaaagccctggccgcctgcagggacggccgggtgcaccgggcagcagaccccttggcggggctaaaggacctcaaggaggtccggggcctcctcgccaaggacctcgccgtcttggcctcgagggaggggctagacctcgtgcccggggacgaccccatgctcctcgcctacctcctggacccctccaacaccacccccgagggggtggcgcggcgctacgggggggagtggacggaggacgccgcccaccgggccctcctctcggagaggctccatcggaacctccttaagcgcctcgagggggaggagaagctcctttggctctaccacgaggtggaaaagcccctctcccgggtcctggcccacatggaggccaccggggtacggcgggacgtggcctaccttcaggccctttccctggagcttgcggaggagatccgccgcctcgaggaggaggtcttccgcttggcgggccaccccttcaacctcaactcccgggaccagctggaaagggtgctctttgacgagcttaggcttcccgccttggggaagacgcaaaagacaggcaagcgctccaccagcgccgcggtgctggaggccctacgggaggcccaccccatcgtggagaagatcctccagcaccgggagctcaccaagctcaagaacacctacgtggaccccctcccaagcctcgtccacccgaggacgggccgcctccacacccgcttcaaccagacggccacggccacggggaggcttagtagctccgaccccaacctgcagaacatccccgtccgcacccccttgggccagaggatccgccgggccttcgtggccgaggcgggttgggcgttggtggccctggactatagccagatagagctccgcgtcctcgcccacctctccggggacgaaaacctgatcagggtcttccaggaggggaaggacatccacacccagaccgcaagctggatgttcggcgtccccccggaggccgtggaccccctgatgcgccgggcggccaagacggtgaacttcggcgtcctctacggcatgtccgcccataggctctcccaggagcttgccatcccctacgaggaggcggtggcctttatagagcgctacttccaaagcttccccaaggtgcgggcctggatagaaaagaccctggaggaggggaggaagcggggctacgtggaaaccctcttcggaagaaggcgctacgtgcccgacctcaacgcccgggtgcaaagcgtcagggaggccgcggagcgcatggccttcaacatgcccgtccagggcaccgccgccgacctcatgaagctcgccatggtgaagctcttcccccgcctccgggagatgggggcccgcatgctcctccaggtccacgacgagctcctcctggaggccccccaagcgcgggccgaggaggtggcggctttggccaaggaggccatggagaaggcctatcccctcgccgtgcccctggaggtggaggtggggatgggggaggactggctttccgccaagggttaggggggccctgccgtttagaggaagttcaaggggttgtccctcagaaacgcctccaggggaacgccctctgggcctaccaggaggcctttagccccaaaggtgcgggtgaaggcttccaggccctggg

SEQ ID NO: 3588 - DNA, 3221 bp, Artificial Sequence
  Description of Artificial Sequence: Synthetic DNA sequence of Thermus thermophilus DNA Polymerase K740H
tctagaggaagcatgagcctcaccctggcagacaaggtggtctacgaggaggagatccagaaaagccgcttcatcgccaaggcggcccccgtggcctcggaggaggaggccttggcgtttttggccgagaaccgggagcctgaggccacccacaacggccacgcctacaagatcggcctcctctaccgcttctctgacgacggggagccctcgggcaccgcaggcaggcccatcctccacgccatagaggcccagggcctggaccgggtggcggtcctggtggtgcgctacttcggcggggtgaagctcggggccggggggcttgtgcgggcctacgggggggtggcggcggaggccttaaggcgggcgcccaaggtccccttggtggagcgggtggggctcgccttcctcgtgcccttcgccgaggtgggccgggtctacgccctcctggaggcccgcgcccctgaaggccgaggagacctacaccccggaggcgtgcgcttcgccctcctcctccccaagcccgagcgggaaggtttcctcagggcgctcctggacgccacccggggacaggtggccctggagtagcatggaggcgatgcttccgctctttgaacccaaaggccgggtcctcctggtggacggccaccacctggcctaccgcaccttcttcgccctgaagggcctcaccacgagccggggcgaaccggtgcaggcggtctacggcttcgccaagagcctcctcaaggccctgaaggaggacgggtacaaggccgtcttcgtggtctttgacgccaaggccccctccttccgccacgaggcctacgaggcctacaaggcggggagggccccgacccccgaggacttcccccggcagctcgccctcatcaaggagctggtggacctcctggggtttacccgcctcgaggtccccggctacgaggcggacgacgttctcgccaccctggccaagaaggcggaaaaggaggggtacgaggtgcgcatcctcaccgccgaccgcgacctctaccaactcgtctccgaccgcgtcgccgtcctccaccccgagggccacctcatcaccccggagtggctttgggagaagtacggcctcaggccggagcagtgggtggacttccgcgccctcgtgggggacccctccgacaacctccccggggtcaagggcatcggggagaagaccgccctcaagctcctcaaggagtggggaagcctggaaaacctcctcaagaacctggaccgggtaaagccagaaaacgtccgggagaagatcaaggcccacctggaagacctcaggctctccttggagctctcccgggtgcgcaccgacctccccctggaggtggacctcgcccaggggcgggagcccgaccgggaggggcttagggccttcctggagaggctggagttcggcagcctcctccacgagttcggcctcctggaggcccccgcccccctggaggaggccccctggcccccgccggaaggggccttcgtgggcttcgtcctctcccgccccgagcccatgtgggcggagcttaaagccctggccgcctgcagggacggccgggtgcaccgggcagcagaccccttggcggggctaaaggacctcaaggaggtccggggcctcctcgccaaggacctcgccgtcttggcctcgagggaggggctagacctcgtgcccggggacgaccccatgctcctcgcctacctcctggacccctccaacaccacccccgagggggtggcgcggcgctacgggggggagtggacggaggacgccgcccaccgggccctcctctcggagaggctccatcggaacctccttaagcgcctcgagggggaggagaagctcctttggctctaccacgaggtggaaaagcccctctcccgggtcctggcccacatggaggccaccggggtacggcgggacgtggcctaccttcaggccctttccctggagcttgcggaggagatccgccgcctcgaggaggaggtcttccgcttggcgggccaccccttcaacctcaactcccgggaccagctggaaagggtgctctttgacgagcttaggcttcccgccttggggaagacgcaaaagacaggcaagcgctccaccagcgccgcggtgctggaggccctacgggaggcccaccccatcgtggagaagatcctccagcaccgggagctcaccaagctcaagaacacctacgtggaccccctcccaagcctcgtccacccgaggacgggccgcctccacacccgcttcaaccagacggccacggccacggggaggcttagtagctccgaccccaacctgcagaacatccccgtccgcacccccttgggccagaggatccgccgggccttcgtggccgaggcgggttgggcgttggtggccctggactatagccagatagagctccgcgtcctcgcccacctctccggggacgaaaacctgatcagggtcttccaggaggggaaggacatccacacccagaccgcaagctggatgttcggcgtccccccggaggccgtggaccccctgatgcgccgggcggccaagacggtgaacttcggcgtcctctacggcatgtccgcccataggctctcccaggagcttgccatcccctacgaggaggcggtggcctttatagagcgctacttccaaagcttccccaaggtgcgggcctggatagaaaagaccctggaggaggggaggaagcggggctacgtggaaaccctcttcggaagaaggcgctacgtgcccgacctcaacgcccgggtgcatagcgtcagggaggccgcggagcgcatggccttcaacatgcccgtccagggcaccgccgccgacctcatgaagctcgccatggtgaagctcttcccccgcctccgggagatgggggcccgcatgctcctccaggtccacgacgagctcctcctggaggccccccaagcgcgggccgaggaggtggcggctttggccaaggaggccatggagaaggcctatcccctcgccgtgcccctggaggtggaggtggggatgggggaggactggctttccgccaagggttaggggggccctgccgtttagaggaagttcaaggggttgtccctcagaaacgcctccaggggaacgccctctgggcctaccaggaggcctttagccccaaaggtgcgggtgaaggcttccaggccctggg

SEQ ID NO: 3589 - DNA, 3221 bp, Artificial Sequence
  Description of Artificial Sequence: Synthetic DNA sequence of Thermus thermophilus DNA Polymerase K740I
tctagaggaagcatgagcctcaccctggcagacaaggtggtctacgaggaggagatccagaaaagccgcttcatcgccaaggcggcccccgtggcctcggaggaggaggccttggcgtttttggccgagaaccgggagcctgaggccacccacaacggccacgcctacaagatcggcctcctctaccgcttctctgacgacggggagccctcgggcaccgcaggcaggcccatcctccacgccatagaggcccagggcctggaccgggtggcggtcctggtggtgcgctacttcggcggggtgaagctcggggccggggggcttgtgcgggcctacgggggggtggcggcggaggccttaaggcgggcgcccaaggtccccttggtggagcgggtggggctcgccttcctcgtgcccttcgccgaggtgggccgggtctacgccctcctggaggcccgcgcccctgaaggccgaggagacctacaccccggaggcgtgcgcttcgccctcctcctccccaagcccgagcgggaaggtttcctcagggcgctcctggacgccacccggggacaggtggccctggagtagcatggaggcgatgcttccgctctttgaacccaaaggccgggtcctcctggtggacggccaccacctggcctaccgcaccttcttcgccctgaagggcctcaccacgagccggggcgaaccggtgcaggcggtctacggcttcgccaagagcctcctcaaggccctgaaggaggacgggtacaaggccgtcttcgtggtctttgacgccaaggccccctccttccgccacgaggcctacgaggcctacaaggcggggagggccccgacccccgaggacttcccccggcagctcgccctcatcaaggagctggtggacctcctggggtttacccgcctcgaggtccccggctacgaggcggacgacgttctcgccaccctggccaagaaggcggaaaaggaggggtacgaggtgcgcatcctcaccgccgaccgcgacctctaccaactcgtctccgaccgcgtcgccgtcctccaccccgagggccacctcatcaccccggagtggctttgggagaagtacggcctcaggccggagcagtgggtggacttccgcgccctcgtgggggacccctccgacaacctccccggggtcaagggcatcggggagaagaccgccctcaagctcctcaaggagtggggaagcctggaaaacctcctcaagaacctggaccgggtaaagccagaaaacgtccgggagaagatcaaggcccacctggaagacctcaggctctccttggagctctcccgggtgcgcaccgacctccccctggaggtggacctcgcccaggggcgggagcccgaccgggaggggcttagggccttcctggagaggctggagttcggcagcctcctccacgagttcggcctcctggaggcccccgcccccctggaggaggccccctggcccccgccggaaggggccttcgtgggcttcgtcctctcccgccccgagcccatgtgggcggagcttaaagccctggccgcctgcagggacggccgggtgcaccgggcagcagaccccttggcggggctaaaggacctcaaggaggtccggggcctcctcgccaaggacctcgccgtcttggcctcgagggaggggctagacctcgtgcccggggacgaccccatgctcctcgcctacctcctggacccctccaacaccacccccgagggggtggcgcggcgctacgggggggagtggacggaggacgccgcccaccgggccctcctctcggagaggctccatcggaacctccttaagcgcctcgagggggaggagaagctcctttggctctaccacgaggtggaaaagcccctctcccgggtcctggcccacatggaggccaccggggtacggcgggacgtggcctaccttcaggccctttccctggagcttgcggaggagatccgccgcctcgaggaggaggtcttccgcttggcgggccaccccttcaacctcaactcccgggaccagctggaaagggtgctctttgacgagcttaggcttcccgccttggggaagacgcaaaagacaggcaagcgctccaccagcgccgcggtgctggaggccctacgggaggcccaccccatcgtggagaagatcctccagcaccgggagctcaccaagctcaagaacacctacgtggaccccctcccaagcctcgtccacccgaggacgggccgcctccacacccgcttcaaccagacggccacggccacggggaggcttagtagctccgaccccaacctgcagaacatccccgtccgcacccccttgggccagaggatccgccgggccttcgtggccgaggcgggttgggcgttggtggccctggactatagccagatagagctccgcgtcctcgcccacctctccggggacgaaaacctgatcagggtcttccaggaggggaaggacatccacacccagaccgcaagctggatgttcggcgtccccccggaggccgtggaccccctgatgcgccgggcggccaagacggtgaacttcggcgtcctctacggcatgtccgcccataggctctcccaggagcttgccatcccctacgaggaggcggtggcctttatagagcgctacttccaaagcttccccaaggtgcgggcctggatagaaaagaccctggaggaggggaggaagcggggctacgtggaaaccctcttcggaagaaggcgctacgtgcccgacctcaacgcccgggtgattagcgtcagggaggccgcggagcgcatggccttcaacatgcccgtccagggcaccgccgccgacctcatgaagctcgccatggtgaagctcttcccccgcctccgggagatgggggcccgcatgctcctccaggtccacgacgagctcctcctggaggccccccaagcgcgggccgaggaggtggcggctttggccaaggaggccatggagaaggcctatcccctcgccgtgcccctggaggtggaggtggggatgggggaggactggctttccgccaagggttaggggggccctgccgtttagaggaagttcaaggggttgtccctcagaaacgcctccaggggaacgccctctgggcctaccaggaggcctttagccccaaaggtgcgggtgaaggcttccaggccctggg

SEQ ID NO: 3590 - DNA, 3221 bp, Artificial Sequence
  Description of Artificial Sequence: Synthetic DNA sequence of Thermus thermophilus DNA Polymerase K740L
tctagaggaagcatgagcctcaccctggcagacaaggtggtctacgaggaggagatccagaaaagccgcttcatcgccaaggcggcccccgtggcctcggaggaggaggccttggcgtttttggccgagaaccgggagcctgaggccacccacaacggccacgcctacaagatcggcctcctctaccgcttctctgacgacggggagccctcgggcaccgcaggcaggcccatcctccacgccatagaggcccagggcctggaccgggtggcggtcctggtggtgcgctacttcggcggggtgaagctcggggccggggggcttgtgcgggcctacgggggggtggcggcggaggccttaaggcgggcgcccaaggtccccttggtggagcgggtggggctcgccttcctcgtgcccttcgccgaggtgggccgggtctacgccctcctggaggcccgcgcccctgaaggccgaggagacctacaccccggaggcgtgcgcttcgccctcctcctccccaagcccgagcgggaaggtttcctcagggcgctcctggacgccacccggggacaggtggccctggagtagcatggaggcgatgcttccgctctttgaacccaaaggccgggtcctcctggtggacggccaccacctggcctaccgcaccttcttcgccctgaagggcctcaccacgagccggggcgaaccggtgcaggcggtctacggcttcgccaagagcctcctcaaggccctgaaggaggacgggtacaaggccgtcttcgtggtctttgacgccaaggccccctccttccgccacgaggcctacgaggcctacaaggcggggagggccccgacccccgaggacttcccccggcagctcgccctcatcaaggagctggtggacctcctggggtttacccgcctcgaggtccccggctacgaggcggacgacgttctcgccaccctggccaagaaggcggaaaaggaggggtacgaggtgcgcatcctcaccgccgaccgcgacctctaccaactcgtctccgaccgcgtcgccgtcctccaccccgagggccacctcatcaccccggagtggctttgggagaagtacggcctcaggccggagcagtgggtggacttccgcgccctcgtgggggacccctccgacaacctccccggggtcaagggcatcggggagaagaccgccctcaagctcctcaaggagtggggaagcctggaaaacctcctcaagaacctggaccgggtaaagccagaaaacgtccgggagaagatcaaggcccacctggaagacctcaggctctccttggagctctcccgggtgcgcaccgacctccccctggaggtggacctcgcccaggggcgggagcccgaccgggaggggcttagggccttcctggagaggctggagttcggcagcctcctccacgagttcggcctcctggaggcccccgcccccctggaggaggccccctggcccccgccggaaggggccttcgtgggcttcgtcctctcccgccccgagcccatgtgggcggagcttaaagccctggccgcctgcagggacggccgggtgcaccgggcagcagaccccttggcggggctaaaggacctcaaggaggtccggggcctcctcgccaaggacctcgccgtcttggcctcgagggaggggctagacctcgtgcccggggacgaccccatgctcctcgcctacctcctggacccctccaacaccacccccgagggggtggcgcggcgctacgggggggagtggacggaggacgccgcccaccgggccctcctctcggagaggctccatcggaacctccttaagcgcctcgagggggaggagaagctcctttggctctaccacgaggtggaaaagcccctctcccgggtcctggcccacatggaggccaccggggtacggcgggacgtggcctaccttcaggccctttccctggagcttgcggaggagatccgccgcctcgaggaggaggtcttccgcttggcgggccaccccttcaacctcaactcccgggaccagctggaaagggtgctctttgacgagcttaggcttcccgccttggggaagacgcaaaagacaggcaagcgctccaccagcgccgcggtgctggaggccctacgggaggcccaccccatcgtggagaagatcctccagcaccgggagctcaccaagctcaagaacacctacgtggaccccctcccaagcctcgtccacccgaggacgggccgcctccacacccgcttcaaccagacggccacggccacggggaggcttagtagctccgaccccaacctgcagaacatccccgtccgcacccccttgggccagaggatccgccgggccttcgtggccgaggcgggttgggcgttggtggccctggactatagccagatagagctccgcgtcctcgcccacctctccggggacgaaaacctgatcagggtcttccaggaggggaaggacatccacacccagaccgcaagctggatgttcggcgtccccccggaggccgtggaccccctgatgcgccgggcggccaagacggtgaacttcggcgtcctctacggcatgtccgcccataggctctcccaggagcttgccatcccctacgaggaggcggtggcctttatagagcgctacttccaaagcttccccaaggtgcgggcctggatagaaaagaccctggaggaggggaggaagcggggctacgtggaaaccctcttcggaagaaggcgctacgtgcccgacctcaacgcccgggtgttaagcgtcagggaggccgcggagcgcatggccttcaacatgcccgtccagggcaccgccgccgacctcatgaagctcgccatggtgaagctcttcccccgcctccgggagatgggggcccgcatgctcctccaggtccacgacgagctcctcctggaggccccccaagcgcgggccgaggaggtggcggctttggccaaggaggccatggagaaggcctatcccctcgccgtgcccctggaggtggaggtggggatgggggaggactggctttccgccaagggttaggggggccctgccgtttagaggaagttcaaggggttgtccctcagaaacgcctccaggggaacgccctctgggcctaccaggaggcctttagccccaaaggtgcgggtgaaggcttccaggccctggg

SEQ ID NO: 3591 - DNA, 3221 bp, Artificial Sequence
  Description of Artificial Sequence: Synthetic DNA sequence of Thermus thermophilus DNA Polymerase K740E
tctagaggaagcatgagcctcaccctggcagacaaggtggtctacgaggaggagatccagaaaagccgcttcatcgccaaggcggcccccgtggcctcggaggaggaggccttggcgtttttggccgagaaccgggagcctgaggccacccacaacggccacgcctacaagatcggcctcctctaccgcttctctgacgacggggagccctcgggcaccgcaggcaggcccatcctccacgccatagaggcccagggcctggaccgggtggcggtcctggtggtgcgctacttcggcggggtgaagctcggggccggggggcttgtgcgggcctacgggggggtggcggcggaggccttaaggcgggcgcccaaggtccccttggtggagcgggtggggctcgccttcctcgtgcccttcgccgaggtgggccgggtctacgccctcctggaggcccgcgcccctgaaggccgaggagacctacaccccggaggcgtgcgcttcgccctcctcctccccaagcccgagcgggaaggtttcctcagggcgctcctggacgccacccggggacaggtggccctggagtagcatggaggcgatgcttccgctctttgaacccaaaggccgggtcctcctggtggacggccaccacctggcctaccgcaccttcttcgccctgaagggcctcaccacgagccggggcgaaccggtgcaggcggtctacggcttcgccaagagcctcctcaaggccctgaaggaggacgggtacaaggccgtcttcgtggtctttgacgccaaggccccctccttccgccacgaggcctacgaggcctacaaggcggggagggccccgacccccgaggacttcccccggcagctcgccctcatcaaggagctggtggacctcctggggtttacccgcctcgaggtccccggctacgaggcggacgacgttctcgccaccctggccaagaaggcggaaaaggaggggtacgaggtgcgcatcctcaccgccgaccgcgacctctaccaactcgtctccgaccgcgtcgccgtcctccaccccgagggccacctcatcaccccggagtggctttgggagaagtacggcctcaggccggagcagtgggtggacttccgcgccctcgtgggggacccctccgacaacctccccggggtcaagggcatcggggagaagaccgccctcaagctcctcaaggagtggggaagcctggaaaacctcctcaagaacctggaccgggtaaagccagaaaacgtccgggagaagatcaaggcccacctggaagacctcaggctctccttggagctctcccgggtgcgcaccgacctccccctggaggtggacctcgcccaggggcgggagcccgaccgggaggggcttagggccttcctggagaggctggagttcggcagcctcctccacgagttcggcctcctggaggcccccgcccccctggaggaggccccctggcccccgccggaaggggccttcgtgggcttcgtcctctcccgccccgagcccatgtgggcggagcttaaagccctggccgcctgcagggacggccgggtgcaccgggcagcagaccccttggcggggctaaaggacctcaaggaggtccggggcctcctcgccaaggacctcgccgtcttggcctcgagggaggggctagacctcgtgcccggggacgaccccatgctcctcgcctacctcctggacccctccaacaccacccccgagggggtggcgcggcgctacgggggggagtggacggaggacgccgcccaccgggccctcctctcggagaggctccatcggaacctccttaagcgcctcgagggggaggagaagctcctttggctctaccacgaggtggaaaagcccctctcccgggtcctggcccacatggaggccaccggggtacggcgggacgtggcctaccttcaggccctttccctggagcttgcggaggagatccgccgcctcgaggaggaggtcttccgcttggcgggccaccccttcaacctcaactcccgggaccagctggaaagggtgctctttgacgagcttaggcttcccgccttggggaagacgcaaaagacaggcaagcgctccaccagcgccgcggtgctggaggccctacgggaggcccaccccatcgtggagaagatcctccagcaccgggagctcaccaagctcaagaacacctacgtggaccccctcccaagcctcgtccacccgaggacgggccgcctccacacccgcttcaaccagacggccacggccacggggaggcttagtagctccgaccccaacctgcagaacatccccgtccgcacccccttgggccagaggatccgccgggccttcgtggccgaggcgggttgggcgttggtggccctggactatagccagatagagctccgcgtcctcgcccacctctccggggacgaaaacctgatcagggtcttccaggaggggaaggacatccacacccagaccgcaagctggatgttcggcgtccccccggaggccgtggaccccctgatgcgccgggcggccaagacggtgaacttcggcgtcctctacggcatgtccgcccataggctctcccaggagcttgccatcccctacgaggaggcggtggcctttatagagcgctacttccaaagcttccccaaggtgcgggcctggatagaaaagaccctggaggaggggaggaagcggggctacgtggaaaccctcttcggaagaaggcgctacgtgcccgacctcaacgcccgggtggaaagcgtcagggaggccgcggagcgcatggccttcaacatgcccgtccagggcaccgccgccgacctcatgaagctcgccatggtgaagctcttcccccgcctccgggagatgggggcccgcatgctcctccaggtccacgacgagctcctcctggaggccccccaagcgcgggccgaggaggtggcggctttggccaaggaggccatggagaaggcctatcccctcgccgtgcccctggaggtggaggtggggatgggggaggactggctttccgccaagggttaggggggccctgccgtttagaggaagttcaaggggttgtccctcagaaacgcctccaggggaacgccctctgggcctaccaggaggcctttagccccaaaggtgcgggtgaaggcttccaggccctggg

SEQ ID NO: 3592 - DNA, 3221 bp, Artificial Sequence
  Description of Artificial Sequence: Synthetic DNA sequence of Thermus thermophilus DNA Polymerase K740D
tctagaggaagcatgagcctcaccctggcagacaaggtggtctacgaggaggagatccagaaaagccgcttcatcgccaaggcggcccccgtggcctcggaggaggaggccttggcgtttttggccgagaaccgggagcctgaggccacccacaacggccacgcctacaagatcggcctcctctaccgcttctctgacgacggggagccctcgggcaccgcaggcaggcccatcctccacgccatagaggcccagggcctggaccgggtggcggtcctggtggtgcgctacttcggcggggtgaagctcggggccggggggcttgtgcgggcctacgggggggtggcggcggaggccttaaggcgggcgcccaaggtccccttggtggagcgggtggggctcgccttcctcgtgcccttcgccgaggtgggccgggtctacgccctcctggaggcccgcgcccctgaaggccgaggagacctacaccccggaggcgtgcgcttcgccctcctcctccccaagcccgagcgggaaggtttcctcagggcgctcctggacgccacccggggacaggtggccctggagtagcatggaggcgatgcttccgctctttgaacccaaaggccgggtcctcctggtggacggccaccacctggcctaccgcaccttcttcgccctgaagggcctcaccacgagccggggcgaaccggtgcaggcggtctacggcttcgccaagagcctcctcaaggccctgaaggaggacgggtacaaggccgtcttcgtggtctttgacgccaaggccccctccttccgccacgaggcctacgaggcctacaaggcggggagggccccgacccccgaggacttcccccggcagctcgccctcatcaaggagctggtggacctcctggggtttacccgcctcgaggtccccggctacgaggcggacgacgttctcgccaccctggccaagaaggcggaaaaggaggggtacgaggtgcgcatcctcaccgccgaccgcgacctctaccaactcgtctccgaccgcgtcgccgtcctccaccccgagggccacctcatcaccccggagtggctttgggagaagtacggcctcaggccggagcagtgggtggacttccgcgccctcgtgggggacccctccgacaacctccccggggtcaagggcatcggggagaagaccgccctcaagctcctcaaggagtggggaagcctggaaaacctcctcaagaacctggaccgggtaaagccagaaaacgtccgggagaagatcaaggcccacctggaagacctcaggctctccttggagctctcccgggtgcgcaccgacctccccctggaggtggacctcgcccaggggcgggagcccgaccgggaggggcttagggccttcctggagaggctggagttcggcagcctcctccacgagttcggcctcctggaggcccccgcccccctggaggaggccccctggcccccgccggaaggggccttcgtgggcttcgtcctctcccgccccgagcccatgtgggcggagcttaaagccctggccgcctgcagggacggccgggtgcaccgggcagcagaccccttggcggggctaaaggacctcaaggaggtccggggcctcctcgccaaggacctcgccgtcttggcctcgagggaggggctagacctcgtgcccggggacgaccccatgctcctcgcctacctcctggacccctccaacaccacccccgagggggtggcgcggcgctacgggggggagtggacggaggacgccgcccaccgggccctcctctcggagaggctccatcggaacctccttaagcgcctcgagggggaggagaagctcctttggctctaccacgaggtggaaaagcccctctcccgggtcctggcccacatggaggccaccggggtacggcgggacgtggcctaccttcaggccctttccctggagcttgcggaggagatccgccgcctcgaggaggaggtcttccgcttggcgggccaccccttcaacctcaactcccgggaccagctggaaagggtgctctttgacgagcttaggcttcccgccttggggaagacgcaaaagacaggcaagcgctccaccagcgccgcggtgctggaggccctacgggaggcccaccccatcgtggagaagatcctccagcaccgggagctcaccaagctcaagaacacctacgtggaccccctcccaagcctcgtccacccgaggacgggccgcctccacacccgcttcaaccagacggccacggccacggggaggcttagtagctccgaccccaacctgcagaacatccccgtccgcacccccttgggccagaggatccgccgggccttcgtggccgaggcgggttgggcgttggtggccctggactatagccagatagagctccgcgtcctcgcccacctctccggggacgaaaacctgatcagggtcttccaggaggggaaggacatccacacccagaccgcaagctggatgttcggcgtccccccggaggccgtggaccccctgatgcgccgggcggccaagacggtgaacttcggcgtcctctacggcatgtccgcccataggctctcccaggagcttgccatcccctacgaggaggcggtggcctttatagagcgctacttccaaagcttccccaaggtgcgggcctggatagaaaagaccctggaggaggggaggaagcggggctacgtggaaaccctcttcggaagaaggcgctacgtgcccgacctcaacgcccgggtggatagcgtcagggaggccgcggagcgcatggccttcaacatgcccgtccagggcaccgccgccgacctcatgaagctcgccatggtgaagctcttcccccgcctccgggagatgggggcccgcatgctcctccaggtccacgacgagctcctcctggaggccccccaagcgcgggccgaggaggtggcggctttggccaaggaggccatggagaaggcctatcccctcgccgtgcccctggaggtggaggtggggatgggggaggactggctttccgccaagggttaggggggccctgccgtttagaggaagttcaaggggttgtccctcagaaacgcctccaggggaacgccctctgggcctaccaggaggcctttagccccaaaggtgcgggtgaaggcttccaggccctggg

SEQ ID NO: 3593 - DNA, 3221 bp, Artificial Sequence
  Description of Artificial Sequence: Synthetic DNA sequence of Thermus thermophilus DNA Polymerase K740F
tctagaggaagcatgagcctcaccctggcagacaaggtggtctacgaggaggagatccagaaaagccgcttcatcgccaaggcggcccccgtggcctcggaggaggaggccttggcgtttttggccgagaaccgggagcctgaggccacccacaacggccacgcctacaagatcggcctcctctaccgcttctctgacgacggggagccctcgggcaccgcaggcaggcccatcctccacgccatagaggcccagggcctggaccgggtggcggtcctggtggtgcgctacttcggcggggtgaagctcggggccggggggcttgtgcgggcctacgggggggtggcggcggaggccttaaggcgggcgcccaaggtccccttggtggagcgggtggggctcgccttcctcgtgcccttcgccgaggtgggccgggtctacgccctcctggaggcccgcgcccctgaaggccgaggagacctacaccccggaggcgtgcgcttcgccctcctcctccccaagcccgagcgggaaggtttcctcagggcgctcctggacgccacccggggacaggtggccctggagtagcatggaggcgatgcttccgctctttgaacccaaaggccgggtcctcctggtggacggccaccacctggcctaccgcaccttcttcgccctgaagggcctcaccacgagccggggcgaaccggtgcaggcggtctacggcttcgccaagagcctcctcaaggccctgaaggaggacgggtacaaggccgtcttcgtggtctttgacgccaaggccccctccttccgccacgaggcctacgaggcctacaaggcggggagggccccgacccccgaggacttcccccggcagctcgccctcatcaaggagctggtggacctcctggggtttacccgcctcgaggtccccggctacgaggcggacgacgttctcgccaccctggccaagaaggcggaaaaggaggggtacgaggtgcgcatcctcaccgccgaccgcgacctctaccaactcgtctccgaccgcgtcgccgtcctccaccccgagggccacctcatcaccccggagtggctttgggagaagtacggcctcaggccggagcagtgggtggacttccgcgccctcgtgggggacccctccgacaacctccccggggtcaagggcatcggggagaagaccgccctcaagctcctcaaggagtggggaagcctggaaaacctcctcaagaacctggaccgggtaaagccagaaaacgtccgggagaagatcaaggcccacctggaagacctcaggctctccttggagctctcccgggtgcgcaccgacctccccctggaggtggacctcgcccaggggcgggagcccgaccgggaggggcttagggccttcctggagaggctggagttcggcagcctcctccacgagttcggcctcctggaggcccccgcccccctggaggaggccccctggcccccgccggaaggggccttcgtgggcttcgtcctctcccgccccgagcccatgtgggcggagcttaaagccctggccgcctgcagggacggccgggtgcaccgggcagcagaccccttggcggggctaaaggacctcaaggaggtccggggcctcctcgccaaggacctcgccgtcttggcctcgagggaggggctagacctcgtgcccggggacgaccccatgctcctcgcctacctcctggacccctccaacaccacccccgagggggtggcgcggcgctacgggggggagtggacggaggacgccgcccaccgggccctcctctcggagaggctccatcggaacctccttaagcgcctcgagggggaggagaagctcctttggctctaccacgaggtggaaaagcccctctcccgggtcctggcccacatggaggccaccggggtacggcgggacgtggcctaccttcaggccctttccctggagcttgcggaggagatccgccgcctcgaggaggaggtcttccgcttggcgggccaccccttcaacctcaactcccgggaccagctggaaagggtgctctttgacgagcttaggcttcccgccttggggaagacgcaaaagacaggcaagcgctccaccagcgccgcggtgctggaggccctacgggaggcccaccccatcgtggagaagatcctccagcaccgggagctcaccaagctcaagaacacctacgtggaccccctcccaagcctcgtccacccgaggacgggccgcctccacacccgcttcaaccagacggccacggccacggggaggcttagtagctccgaccccaacctgcagaacatccccgtccgcacccccttgggccagaggatccgccgggccttcgtggccgaggcgggttgggcgttggtggccctggactatagccagatagagctccgcgtcctcgcccacctctccggggacgaaaacctgatcagggtcttccaggaggggaaggacatccacacccagaccgcaagctggatgttcggcgtccccccggaggccgtggaccccctgatgcgccgggcggccaagacggtgaacttcggcgtcctctacggcatgtccgcccataggctctcccaggagcttgccatcccctacgaggaggcggtggcctttatagagcgctacttccaaagcttccccaaggtgcgggcctggatagaaaagaccctggaggaggggaggaagcggggctacgtggaaaccctcttcggaagaaggcgctacgtgcccgacctcaacgcccgggtgtttagcgtcagggaggccgcggagcgcatggccttcaacatgcccgtccagggcaccgccgccgacctcatgaagctcgccatggtgaagctcttcccccgcctccgggagatgggggcccgcatgctcctccaggtccacgacgagctcctcctggaggccccccaagcgcgggccgaggaggtggcggctttggccaaggaggccatggagaaggcctatcccctcgccgtgcccctggaggtggaggtggggatgggggaggactggctttccgccaagggttaggggggccctgccgtttagaggaagttcaaggggttgtccctcagaaacgcctccaggggaacgccctctgggcctaccaggaggcctttagccccaaaggtgcgggtgaaggcttccaggccctggg

SEQ ID NO: 3594 - DNA, 3221 bp, Artificial Sequence
  Description of Artificial Sequence: Synthetic DNA sequence of Thermus thermophilus DNA Polymerase K740S
tctagaggaagcatgagcctcaccctggcagacaaggtggtctacgaggaggagatccagaaaagccgcttcatcgccaaggcggcccccgtggcctcggaggaggaggccttggcgtttttggccgagaaccgggagcctgaggccacccacaacggccacgcctacaagatcggcctcctctaccgcttctctgacgacggggagccctcgggcaccgcaggcaggcccatcctccacgccatagaggcccagggcctggaccgggtggcggtcctggtggtgcgctacttcggcggggtgaagctcggggccggggggcttgtgcgggcctacgggggggtggcggcggaggccttaaggcgggcgcccaaggtccccttggtggagcgggtggggctcgccttcctcgtgcccttcgccgaggtgggccgggtctacgccctcctggaggcccgcgcccctgaaggccgaggagacctacaccccggaggcgtgcgcttcgccctcctcctccccaagcccgagcgggaaggtttcctcagggcgctcctggacgccacccggggacaggtggccctggagtagcatggaggcgatgcttccgctctttgaacccaaaggccgggtcctcctggtggacggccaccacctggcctaccgcaccttcttcgccctgaagggcctcaccacgagccggggcgaaccggtgcaggcggtctacggcttcgccaagagcctcctcaaggccctgaaggaggacgggtacaaggccgtcttcgtggtctttgacgccaaggccccctccttccgccacgaggcctacgaggcctacaaggcggggagggccccgacccccgaggacttcccccggcagctcgccctcatcaaggagctggtggacctcctggggtttacccgcctcgaggtccccggctacgaggcggacgacgttctcgccaccctggccaagaaggcggaaaaggaggggtacgaggtgcgcatcctcaccgccgaccgcgacctctaccaactcgtctccgaccgcgtcgccgtcctccaccccgagggccacctcatcaccccggagtggctttgggagaagtacggcctcaggccggagcagtgggtggacttccgcgccctcgtgggggacccctccgacaacctccccggggtcaagggcatcggggagaagaccgccctcaagctcctcaaggagtggggaagcctggaaaacctcctcaagaacctggaccgggtaaagccagaaaacgtccgggagaagatcaaggcccacctggaagacctcaggctctccttggagctctcccgggtgcgcaccgacctccccctggaggtggacctcgcccaggggcgggagcccgaccgggaggggcttagggccttcctggagaggctggagttcggcagcctcctccacgagttcggcctcctggaggcccccgcccccctggaggaggccccctggcccccgccggaaggggccttcgtgggcttcgtcctctcccgccccgagcccatgtgggcggagcttaaagccctggccgcctgcagggacggccgggtgcaccgggcagcagaccccttggcggggctaaaggacctcaaggaggtccggggcctcctcgccaaggacctcgccgtcttggcctcgagggaggggctagacctcgtgcccggggacgaccccatgctcctcgcctacctcctggacccctccaacaccacccccgagggggtggcgcggcgctacgggggggagtggacggaggacgccgcccaccgggccctcctctcggagaggctccatcggaacctccttaagcgcctcgagggggaggagaagctcctttggctctaccacgaggtggaaaagcccctctcccgggtcctggcccacatggaggccaccggggtacggcgggacgtggcctaccttcaggccctttccctggagcttgcggaggagatccgccgcctcgaggaggaggtcttccgcttggcgggccaccccttcaacctcaactcccgggaccagctggaaagggtgctctttgacgagcttaggcttcccgccttggggaagacgcaaaagacaggcaagcgctccaccagcgccgcggtgctggaggccctacgggaggcccaccccatcgtggagaagatcctccagcaccgggagctcaccaagctcaagaacacctacgtggaccccctcccaagcctcgtccacccgaggacgggccgcctccacacccgcttcaaccagacggccacggccacggggaggcttagtagctccgaccccaacctgcagaacatccccgtccgcacccccttgggccagaggatccgccgggccttcgtggccgaggcgggttgggcgttggtggccctggactatagccagatagagctccgcgtcctcgcccacctctccggggacgaaaacctgatcagggtcttccaggaggggaaggacatccacacccagaccgcaagctggatgttcggcgtccccccggaggccgtggaccccctgatgcgccgggcggccaagacggtgaacttcggcgtcctctacggcatgtccgcccataggctctcccaggagcttgccatcccctacgaggaggcggtggcctttatagagcgctacttccaaagcttccccaaggtgcgggcctggatagaaaagaccctggaggaggggaggaagcggggctacgtggaaaccctcttcggaagaaggcgctacgtgcccgacctcaacgcccgggtgtctagcgtcagggaggccgcggagcgcatggccttcaacatgcccgtccagggcaccgccgccgacctcatgaagctcgccatggtgaagctcttcccccgcctccgggagatgggggcccgcatgctcctccaggtccacgacgagctcctcctggaggccccccaagcgcgggccgaggaggtggcggctttggccaaggaggccatggagaaggcctatcccctcgccgtgcccctggaggtggaggtggggatgggggaggactggctttccgccaagggttaggggggccctgccgtttagaggaagttcaaggggttgtccctcagaaacgcctccaggggaacgccctctgggcctaccaggaggcctttagccccaaaggtgcgggtgaaggcttccaggccctggg

SEQ ID NO: 3595 - DNA, 3221 bp, Artificial Sequence
  Description of Artificial Sequence: Synthetic DNA sequence of Thermus thermophilus DNA Polymerase K740Y
tctagaggaagcatgagcctcaccctggcagacaaggtggtctacgaggaggagatccagaaaagccgcttcatcgccaaggcggcccccgtggcctcggaggaggaggccttggcgtttttggccgagaaccgggagcctgaggccacccacaacggccacgcctacaagatcggcctcctctaccgcttctctgacgacggggagccctcgggcaccgcaggcaggcccatcctccacgccatagaggcccagggcctggaccgggtggcggtcctggtggtgcgctacttcggcggggtgaagctcggggccggggggcttgtgcgggcctacgggggggtggcggcggaggccttaaggcgggcgcccaaggtccccttggtggagcgggtggggctcgccttcctcgtgcccttcgccgaggtgggccgggtctacgccctcctggaggcccgcgcccctgaaggccgaggagacctacaccccggaggcgtgcgcttcgccctcctcctccccaagcccgagcgggaaggtttcctcagggcgctcctggacgccacccggggacaggtggccctggagtagcatggaggcgatgcttccgctctttgaacccaaaggccgggtcctcctggtggacggccaccacctggcctaccgcaccttcttcgccctgaagggcctcaccacgagccggggcgaaccggtgcaggcggtctacggcttcgccaagagcctcctcaaggccctgaaggaggacgggtacaaggccgtcttcgtggtctttgacgccaaggccccctccttccgccacgaggcctacgaggcctacaaggcggggagggccccgacccccgaggacttcccccggcagctcgccctcatcaaggagctggtggacctcctggggtttacccgcctcgaggtccccggctacgaggcggacgacgttctcgccaccctggccaagaaggcggaaaaggaggggtacgaggtgcgcatcctcaccgccgaccgcgacctctaccaactcgtctccgaccgcgtcgccgtcctccaccccgagggccacctcatcaccccggagtggctttgggagaagtacggcctcaggccggagcagtgggtggacttccgcgccctcgtgggggacccctccgacaacctccccggggtcaagggcatcggggagaagaccgccctcaagctcctcaaggagtggggaagcctggaaaacctcctcaagaacctggaccgggtaaagccagaaaacgtccgggagaagatcaaggcccacctggaagacctcaggctctccttggagctctcccgggtgcgcaccgacctccccctggaggtggacctcgcccaggggcgggagcccgaccgggaggggcttagggccttcctggagaggctggagttcggcagcctcctccacgagttcggcctcctggaggcccccgcccccctggaggaggccccctggcccccgccggaaggggccttcgtgggcttcgtcctctcccgccccgagcccatgtgggcggagcttaaagccctggccgcctgcagggacggccgggtgcaccgggcagcagaccccttggcggggctaaaggacctcaaggaggtccggggcctcctcgccaaggacctcgccgtcttggcctcgagggaggggctagacctcgtgcccggggacgaccccatgctcctcgcctacctcctggacccctccaacaccacccccgagggggtggcgcggcgctacgggggggagtggacggaggacgccgcccaccgggccctcctctcggagaggctccatcggaacctccttaagcgcctcgagggggaggagaagctcctttggctctaccacgaggtggaaaagcccctctcccgggtcctggcccacatggaggccaccggggtacggcgggacgtggcctaccttcaggccctttccctggagcttgcggaggagatccgccgcctcgaggaggaggtcttccgcttggcgggccaccccttcaacctcaactcccgggaccagctggaaagggtgctctttgacgagcttaggcttcccgccttggggaagacgcaaaagacaggcaagcgctccaccagcgccgcggtgctggaggccctacgggaggcccaccccatcgtggagaagatcctccagcaccgggagctcaccaagctcaagaacacctacgtggaccccctcccaagcctcgtccacccgaggacgggccgcctccacacccgcttcaaccagacggccacggccacggggaggcttagtagctccgaccccaacctgcagaacatccccgtccgcacccccttgggccagaggatccgccgggccttcgtggccgaggcgggttgggcgttggtggccctggactatagccagatagagctccgcgtcctcgcccacctctccggggacgaaaacctgatcagggtcttccaggaggggaaggacatccacacccagaccgcaagctggatgttcggcgtccccccggaggccgtggaccccctgatgcgccgggcggccaagacggtgaacttcggcgtcctctacggcatgtccgcccataggctctcccaggagcttgccatcccctacgaggaggcggtggcctttatagagcgctacttccaaagcttccccaaggtgcgggcctggatagaaaagaccctggaggaggggaggaagcggggctacgtggaaaccctcttcggaagaaggcgctacgtgcccgacctcaacgcccgggtgtatagcgtcagggaggccgcggagcgcatggccttcaacatgcccgtccagggcaccgccgccgacctcatgaagctcgccatggtgaagctcttcccccgcctccgggagatgggggcccgcatgctcctccaggtccacgacgagctcctcctggaggccccccaagcgcgggccgaggaggtggcggctttggccaaggaggccatggagaaggcctatcccctcgccgtgcccctggaggtggaggtggggatgggggaggactggctttccgccaagggttaggggggccctgccgtttagaggaagttcaaggggttgtccctcagaaacgcctccaggggaacgccctctgggcctaccaggaggcctttagccccaaaggtgcgggtgaaggcttccaggccctggg

SEQ ID NO: 3596 - DNA, 3221 bp, Artificial Sequence
  Description of Artificial Sequence: Synthetic DNA sequence of Thermus thermophilus DNA Polymerase K740W
tctagaggaagcatgagcctcaccctggcagacaaggtggtctacgaggaggagatccagaaaagccgcttcatcgccaaggcggcccccgtggcctcggaggaggaggccttggcgtttttggccgagaaccgggagcctgaggccacccacaacggccacgcctacaagatcggcctcctctaccgcttctctgacgacggggagccctcgggcaccgcaggcaggcccatcctccacgccatagaggcccagggcctggaccgggtggcggtcctggtggtgcgctacttcggcggggtgaagctcggggccggggggcttgtgcgggcctacgggggggtggcggcggaggccttaaggcgggcgcccaaggtccccttggtggagcgggtggggctcgccttcctcgtgcccttcgccgaggtgggccgggtctacgccctcctggaggcccgcgcccctgaaggccgaggagacctacaccccggaggcgtgcgcttcgccctcctcctccccaagcccgagcgggaaggtttcctcagggcgctcctggacgccacccggggacaggtggccctggagtagcatggaggcgatgcttccgctctttgaacccaaaggccgggtcctcctggtggacggccaccacctggcctaccgcaccttcttcgccctgaagggcctcaccacgagccggggcgaaccggtgcaggcggtctacggcttcgccaagagcctcctcaaggccctgaaggaggacgggtacaaggccgtcttcgtggtctttgacgccaaggccccctccttccgccacgaggcctacgaggcctacaaggcggggagggccccgacccccgaggacttcccccggcagctcgccctcatcaaggagctggtggacctcctggggtttacccgcctcgaggtccccggctacgaggcggacgacgttctcgccaccctggccaagaaggcggaaaaggaggggtacgaggtgcgcatcctcaccgccgaccgcgacctctaccaactcgtctccgaccgcgtcgccgtcctccaccccgagggccacctcatcaccccggagtggctttgggagaagtacggcctcaggccggagcagtgggtggacttccgcgccctcgtgggggacccctccgacaacctccccggggtcaagggcatcggggagaagaccgccctcaagctcctcaaggagtggggaagcctggaaaacctcctcaagaacctggaccgggtaaagccagaaaacgtccgggagaagatcaaggcccacctggaagacctcaggctctccttggagctctcccgggtgcgcaccgacctccccctggaggtggacctcgcccaggggcgggagcccgaccgggaggggcttagggccttcctggagaggctggagttcggcagcctcctccacgagttcggcctcctggaggcccccgcccccctggaggaggccccctggcccccgccggaaggggccttcgtgggcttcgtcctctcccgccccgagcccatgtgggcggagcttaaagccctggccgcctgcagggacggccgggtgcaccgggcagcagaccccttggcggggctaaaggacctcaaggaggtccggggcctcctcgccaaggacctcgccgtcttggcctcgagggaggggctagacctcgtgcccggggacgaccccatgctcctcgcctacctcctggacccctccaacaccacccccgagggggtggcgcggcgctacgggggggagtggacggaggacgccgcccaccgggccctcctctcggagaggctccatcggaacctccttaagcgcctcgagggggaggagaagctcctttggctctaccacgaggtggaaaagcccctctcccgggtcctggcccacatggaggccaccggggtacggcgggacgtggcctaccttcaggccctttccctggagcttgcggaggagatccgccgcctcgaggaggaggtcttccgcttggcgggccaccccttcaacctcaactcccgggaccagctggaaagggtgctctttgacgagcttaggcttcccgccttggggaagacgcaaaagacaggcaagcgctccaccagcgccgcggtgctggaggccctacgggaggcccaccccatcgtggagaagatcctccagcaccgggagctcaccaagctcaagaacacctacgtggaccccctcccaagcctcgtccacccgaggacgggccgcctccacacccgcttcaaccagacggccacggccacggggaggcttagtagctccgaccccaacctgcagaacatccccgtccgcacccccttgggccagaggatccgccgggccttcgtggccgaggcgggttgggcgttggtggccctggactatagccagatagagctccgcgtcctcgcccacctctccggggacgaaaacctgatcagggtcttccaggaggggaaggacatccacacccagaccgcaagctggatgttcggcgtccccccggaggccgtggaccccctgatgcgccgggcggccaagacggtgaacttcggcgtcctctacggcatgtccgcccataggctctcccaggagcttgccatcccctacgaggaggcggtggcctttatagagcgctacttccaaagcttccccaaggtgcgggcctggatagaaaagaccctggaggaggggaggaagcggggctacgtggaaaccctcttcggaagaaggcgctacgtgcccgacctcaacgcccgggtgtggagcgtcagggaggccgcggagcgcatggccttcaacatgcccgtccagggcaccgccgccgacctcatgaagctcgccatggtgaagctcttcccccgcctccgggagatgggggcccgcatgctcctccaggtccacgacgagctcctcctggaggccccccaagcgcgggccgaggaggtggcggctttggccaaggaggccatggagaaggcctatcccctcgccgtgcccctggaggtggaggtggggatgggggaggactggctttccgccaagggttaggggggccctgccgtttagaggaagttcaaggggttgtccctcagaaacgcctccaggggaacgccctctgggcctaccaggaggcctttagccccaaaggtgcgggtgaaggcttccaggccctggg

SEQ ID NO: 3597 - DNA, 3221 bp, Artificial Sequence
  Description of Artificial Sequence: Synthetic DNA sequence of Thermus thermophilus DNA Polymerase K740P
tctagaggaagcatgagcctcaccctggcagacaaggtggtctacgaggaggagatccagaaaagccgcttcatcgccaaggcggcccccgtggcctcggaggaggaggccttggcgtttttggccgagaaccgggagcctgaggccacccacaacggccacgcctacaagatcggcctcctctaccgcttctctgacgacggggagccctcgggcaccgcaggcaggcccatcctccacgccatagaggcccagggcctggaccgggtggcggtcctggtggtgcgctacttcggcggggtgaagctcggggccggggggcttgtgcgggcctacgggggggtggcggcggaggccttaaggcgggcgcccaaggtccccttggtggagcgggtggggctcgccttcctcgtgcccttcgccgaggtgggccgggtctacgccctcctggaggcccgcgcccctgaaggccgaggagacctacaccccggaggcgtgcgcttcgccctcctcctccccaagcccgagcgggaaggtttcctcagggcgctcctggacgccacccggggacaggtggccctggagtagcatggaggcgatgcttccgctctttgaacccaaaggccgggtcctcctggtggacggccaccacctggcctaccgcaccttcttcgccctgaagggcctcaccacgagccggggcgaaccggtgcaggcggtctacggcttcgccaagagcctcctcaaggccctgaaggaggacgggtacaaggccgtcttcgtggtctttgacgccaaggccccctccttccgccacgaggcctacgaggcctacaaggcggggagggccccgacccccgaggacttcccccggcagctcgccctcatcaaggagctggtggacctcctggggtttacccgcctcgaggtccccggctacgaggcggacgacgttctcgccaccctggccaagaaggcggaaaaggaggggtacgaggtgcgcatcctcaccgccgaccgcgacctctaccaactcgtctccgaccgcgtcgccgtcctccaccccgagggccacctcatcaccccggagtggctttgggagaagtacggcctcaggccggagcagtgggtggacttccgcgccctcgtgggggacccctccgacaacctccccggggtcaagggcatcggggagaagaccgccctcaagctcctcaaggagtggggaagcctggaaaacctcctcaagaacctggaccgggtaaagccagaaaacgtccgggagaagatcaaggcccacctggaagacctcaggctctccttggagctctcccgggtgcgcaccgacctccccctggaggtggacctcgcccaggggcgggagcccgaccgggaggggcttagggccttcctggagaggctggagttcggcagcctcctccacgagttcggcctcctggaggcccccgcccccctggaggaggccccctggcccccgccggaaggggccttcgtgggcttcgtcctctcccgccccgagcccatgtgggcggagcttaaagccctggccgcctgcagggacggccgggtgcaccgggcagcagaccccttggcggggctaaaggacctcaaggaggtccggggcctcctcgccaaggacctcgccgtcttggcctcgagggaggggctagacctcgtgcccggggacgaccccatgctcctcgcctacctcctggacccctccaacaccacccccgagggggtggcgcggcgctacgggggggagtggacggaggacgccgcccaccgggccctcctctcggagaggctccatcggaacctccttaagcgcctcgagggggaggagaagctcctttggctctaccacgaggtggaaaagcccctctcccgggtcctggcccacatggaggccaccggggtacggcgggacgtggcctaccttcaggccctttccctggagcttgcggaggagatccgccgcctcgaggaggaggtcttccgcttggcgggccaccccttcaacctcaactcccgggaccagctggaaagggtgctctttgacgagcttaggcttcccgccttggggaagacgcaaaagacaggcaagcgctccaccagcgccgcggtgctggaggccctacgggaggcccaccccatcgtggagaagatcctccagcaccgggagctcaccaagctcaagaacacctacgtggaccccctcccaagcctcgtccacccgaggacgggccgcctccacacccgcttcaaccagacggccacggccacggggaggcttagtagctccgaccccaacctgcagaacatccccgtccgcacccccttgggccagaggatccgccgggccttcgtggccgaggcgggttgggcgttggtggccctggactatagccagatagagctccgcgtcctcgcccacctctccggggacgaaaacctgatcagggtcttccaggaggggaaggacatccacacccagaccgcaagctggatgttcggcgtccccccggaggccgtggaccccctgatgcgccgggcggccaagacggtgaacttcggcgtcctctacggcatgtccgcccataggctctcccaggagcttgccatcccctacgaggaggcggtggcctttatagagcgctacttccaaagcttccccaaggtgcgggcctggatagaaaagaccctggaggaggggaggaagcggggctacgtggaaaccctcttcggaagaaggcgctacgtgcccgacctcaacgcccgggtgcctagcgtcagggaggccgcggagcgcatggccttcaacatgcccgtccagggcaccgccgccgacctcatgaagctcgccatggtgaagctcttcccccgcctccgggagatgggggcccgcatgctcctccaggtccacgacgagctcctcctggaggccccccaagcgcgggccgaggaggtggcggctttggccaaggaggccatggagaaggcctatcccctcgccgtgcccctggaggtggaggtggggatgggggaggactggctttccgccaagggttaggggggccctgccgtttagaggaagttcaaggggttgtccctcagaaacgcctccaggggaacgccctctgggcctaccaggaggcctttagccccaaaggtgcgggtgaaggcttccaggccctggg

SEQ ID NO: 3598 - DNA, 3221 bp, Artificial Sequence
  Description of Artificial Sequence: Synthetic DNA sequence of Thermus thermophilus DNA Polymerase K740M
tctagaggaagcatgagcctcaccctggcagacaaggtggtctacgaggaggagatccagaaaagccgcttcatcgccaaggcggcccccgtggcctcggaggaggaggccttggcgtttttggccgagaaccgggagcctgaggccacccacaacggccacgcctacaagatcggcctcctctaccgcttctctgacgacggggagccctcgggcaccgcaggcaggcccatcctccacgccatagaggcccagggcctggaccgggtggcggtcctggtggtgcgctacttcggcggggtgaagctcggggccggggggcttgtgcgggcctacgggggggtggcggcggaggccttaaggcgggcgcccaaggtccccttggtggagcgggtggggctcgccttcctcgtgcccttcgccgaggtgggccgggtctacgccctcctggaggcccgcgcccctgaaggccgaggagacctacaccccggaggcgtgcgcttcgccctcctcctccccaagcccgagcgggaaggtttcctcagggcgctcctggacgccacccggggacaggtggccctggagtagcatggaggcgatgcttccgctctttgaacccaaaggccgggtcctcctggtggacggccaccacctggcctaccgcaccttcttcgccctgaagggcctcaccacgagccggggcgaaccggtgcaggcggtctacggcttcgccaagagcctcctcaaggccctgaaggaggacgggtacaaggccgtcttcgtggtctttgacgccaaggccccctccttccgccacgaggcctacgaggcctacaaggcggggagggccccgacccccgaggacttcccccggcagctcgccctcatcaaggagctggtggacctcctggggtttacccgcctcgaggtccccggctacgaggcggacgacgttctcgccaccctggccaagaaggcggaaaaggaggggtacgaggtgcgcatcctcaccgccgaccgcgacctctaccaactcgtctccgaccgcgtcgccgtcctccaccccgagggccacctcatcaccccggagtggctttgggagaagtacggcctcaggccggagcagtgggtggacttccgcgccctcgtgggggacccctccgacaacctccccggggtcaagggcatcggggagaagaccgccctcaagctcctcaaggagtggggaagcctggaaaacctcctcaagaacctggaccgggtaaagccagaaaacgtccgggagaagatcaaggcccacctggaagacctcaggctctccttggagctctcccgggtgcgcaccgacctccccctggaggtggacctcgcccaggggcgggagcccgaccgggaggggcttagggccttcctggagaggctggagttcggcagcctcctccacgagttcggcctcctggaggcccccgcccccctggaggaggccccctggcccccgccggaaggggccttcgtgggcttcgtcctctcccgccccgagcccatgtgggcggagcttaaagccctggccgcctgcagggacggccgggtgcaccgggcagcagaccccttggcggggctaaaggacctcaaggaggtccggggcctcctcgccaaggacctcgccgtcttggcctcgagggaggggctagacctcgtgcccggggacgaccccatgctcctcgcctacctcctggacccctccaacaccacccccgagggggtggcgcggcgctacgggggggagtggacggaggacgccgcccaccgggccctcctctcggagaggctccatcggaacctccttaagcgcctcgagggggaggagaagctcctttggctctaccacgaggtggaaaagcccctctcccgggtcctggcccacatggaggccaccggggtacggcgggacgtggcctaccttcaggccctttccctggagcttgcggaggagatccgccgcctcgaggaggaggtcttccgcttggcgggccaccccttcaacctcaactcccgggaccagctggaaagggtgctctttgacgagcttaggcttcccgccttggggaagacgcaaaagacaggcaagcgctccaccagcgccgcggtgctggaggccctacgggaggcccaccccatcgtggagaagatcctccagcaccgggagctcaccaagctcaagaacacctacgtggaccccctcccaagcctcgtccacccgaggacgggccgcctccacacccgcttcaaccagacggccacggccacggggaggcttagtagctccgaccccaacctgcagaacatccccgtccgcacccccttgggccagaggatccgccgggccttcgtggccgaggcgggttgggcgttggtggccctggactatagccagatagagctccgcgtcctcgcccacctctccggggacgaaaacctgatcagggtcttccaggaggggaaggacatccacacccagaccgcaagctggatgttcggcgtccccccggaggccgtggaccccctgatgcgccgggcggccaagacggtgaacttcggcgtcctctacggcatgtccgcccataggctctcccaggagcttgccatcccctacgaggaggcggtggcctttatagagcgctacttccaaagcttccccaaggtgcgggcctggatagaaaagaccctggaggaggggaggaagcggggctacgtggaaaccctcttcggaagaaggcgctacgtgcccgacctcaacgcccgggtgatgagcgtcagggaggccgcggagcgcatggccttcaacatgcccgtccagggcaccgccgccgacctcatgaagctcgccatggtgaagctcttcccccgcctccgggagatgggggcccgcatgctcctccaggtccacgacgagctcctcctggaggccccccaagcgcgggccgaggaggtggcggctttggccaaggaggccatggagaaggcctatcccctcgccgtgcccctggaggtggaggtggggatgggggaggactggctttccgccaagggttaggggggccctgccgtttagaggaagttcaaggggttgtccctcagaaacgcctccaggggaacgccctctgggcctaccaggaggcctttagccccaaaggtgcgggtgaaggcttccaggccctggg

SEQ ID NO: 3599 - DNA, 3221 bp, Artificial Sequence
  Description of Artificial Sequence: Synthetic DNA sequence of Thermus thermophilus DNA Polymerase K740T
tctagaggaagcatgagcctcaccctggcagacaaggtggtctacgaggaggagatccagaaaagccgcttcatcgccaaggcggcccccgtggcctcggaggaggaggccttggcgtttttggccgagaaccgggagcctgaggccacccacaacggccacgcctacaagatcggcctcctctaccgcttctctgacgacggggagccctcgggcaccgcaggcaggcccatcctccacgccatagaggcccagggcctggaccgggtggcggtcctggtggtgcgctacttcggcggggtgaagctcggggccggggggcttgtgcgggcctacgggggggtggcggcggaggccttaaggcgggcgcccaaggtccccttggtggagcgggtggggctcgccttcctcgtgcccttcgccgaggtgggccgggtctacgccctcctggaggcccgcgcccctgaaggccgaggagacctacaccccggaggcgtgcgcttcgccctcctcctccccaagcccgagcgggaaggtttcctcagggcgctcctggacgccacccggggacaggtggccctggagtagcatggaggcgatgcttccgctctttgaacccaaaggccgggtcctcctggtggacggccaccacctggcctaccgcaccttcttcgccctgaagggcctcaccacgagccggggcgaaccggtgcaggcggtctacggcttcgccaagagcctcctcaaggccctgaaggaggacgggtacaaggccgtcttcgtggtctttgacgccaaggccccctccttccgccacgaggcctacgaggcctacaaggcggggagggccccgacccccgaggacttcccccggcagctcgccctcatcaaggagctggtggacctcctggggtttacccgcctcgaggtccccggctacgaggcggacgacgttctcgccaccctggccaagaaggcggaaaaggaggggtacgaggtgcgcatcctcaccgccgaccgcgacctctaccaactcgtctccgaccgcgtcgccgtcctccaccccgagggccacctcatcaccccggagtggctttgggagaagtacggcctcaggccggagcagtgggtggacttccgcgccctcgtgggggacccctccgacaacctccccggggtcaagggcatcggggagaagaccgccctcaagctcctcaaggagtggggaagcctggaaaacctcctcaagaacctggaccgggtaaagccagaaaacgtccgggagaagatcaaggcccacctggaagacctcaggctctccttggagctctcccgggtgcgcaccgacctccccctggaggtggacctcgcccaggggcgggagcccgaccgggaggggcttagggccttcctggagaggctggagttcggcagcctcctccacgagttcggcctcctggaggcccccgcccccctggaggaggccccctggcccccgccggaaggggccttcgtgggcttcgtcctctcccgccccgagcccatgtgggcggagcttaaagccctggccgcctgcagggacggccgggtgcaccgggcagcagaccccttggcggggctaaaggacctcaaggaggtccggggcctcctcgccaaggacctcgccgtcttggcctcgagggaggggctagacctcgtgcccggggacgaccccatgctcctcgcctacctcctggacccctccaacaccacccccgagggggtggcgcggcgctacgggggggagtggacggaggacgccgcccaccgggccctcctctcggagaggctccatcggaacctccttaagcgcctcgagggggaggagaagctcctttggctctaccacgaggtggaaaagcccctctcccgggtcctggcccacatggaggccaccggggtacggcgggacgtggcctaccttcaggccctttccctggagcttgcggaggagatccgccgcctcgaggaggaggtcttccgcttggcgggccaccccttcaacctcaactcccgggaccagctggaaagggtgctctttgacgagcttaggcttcccgccttggggaagacgcaaaagacaggcaagcgctccaccagcgccgcggtgctggaggccctacgggaggcccaccccatcgtggagaagatcctccagcaccgggagctcaccaagctcaagaacacctacgtggaccccctcccaagcctcgtccacccgaggacgggccgcctccacacccgcttcaaccagacggccacggccacggggaggcttagtagctccgaccccaacctgcagaacatccccgtccgcacccccttgggccagaggatccgccgggccttcgtggccgaggcgggttgggcgttggtggccctggactatagccagatagagctccgcgtcctcgcccacctctccggggacgaaaacctgatcagggtcttccaggaggggaaggacatccacacccagaccgcaagctggatgttcggcgtccccccggaggccgtggaccccctgatgcgccgggcggccaagacggtgaacttcggcgtcctctacggcatgtccgcccataggctctcccaggagcttgccatcccctacgaggaggcggtggcctttatagagcgctacttccaaagcttccccaaggtgcgggcctggatagaaaagaccctggaggaggggaggaagcggggctacgtggaaaccctcttcggaagaaggcgctacgtgcccgacctcaacgcccgggtgactagcgtcagggaggccgcggagcgcatggccttcaacatgcccgtccagggcaccgccgccgacctcatgaagctcgccatggtgaagctcttcccccgcctccgggagatgggggcccgcatgctcctccaggtccacgacgagctcctcctggaggccccccaagcgcgggccgaggaggtggcggctttggccaaggaggccatggagaaggcctatcccctcgccgtgcccctggaggtggaggtggggatgggggaggactggctttccgccaagggttaggggggccctgccgtttagaggaagttcaaggggttgtccctcagaaacgcctccaggggaacgccctctgggcctaccaggaggcctttagccccaaaggtgcgggtgaaggcttccaggccctggg

SEQ ID NO: 3600 - DNA, 3221 bp, Artificial Sequence
  Description of Artificial Sequence: Synthetic DNA sequence of Thermus thermophilus DNA Polymerase K740N
tctagaggaagcatgagcctcaccctggcagacaaggtggtctacgaggaggagatccagaaaagccgcttcatcgccaaggcggcccccgtggcctcggaggaggaggccttggcgtttttggccgagaaccgggagcctgaggccacccacaacggccacgcctacaagatcggcctcctctaccgcttctctgacgacggggagccctcgggcaccgcaggcaggcccatcctccacgccatagaggcccagggcctggaccgggtggcggtcctggtggtgcgctacttcggcggggtgaagctcggggccggggggcttgtgcgggcctacgggggggtggcggcggaggccttaaggcgggcgcccaaggtccccttggtggagcgggtggggctcgccttcctcgtgcccttcgccgaggtgggccgggtctacgccctcctggaggcccgcgcccctgaaggccgaggagacctacaccccggaggcgtgcgcttcgccctcctcctccccaagcccgagcgggaaggtttcctcagggcgctcctggacgccacccggggacaggtggccctggagtagcatggaggcgatgcttccgctctttgaacccaaaggccgggtcctcctggtggacggccaccacctggcctaccgcaccttcttcgccctgaagggcctcaccacgagccggggcgaaccggtgcaggcggtctacggcttcgccaagagcctcctcaaggccctgaaggaggacgggtacaaggccgtcttcgtggtctttgacgccaaggccccctccttccgccacgaggcctacgaggcctacaaggcggggagggccccgacccccgaggacttcccccggcagctcgccctcatcaaggagctggtggacctcctggggtttacccgcctcgaggtccccggctacgaggcggacgacgttctcgccaccctggccaagaaggcggaaaaggaggggtacgaggtgcgcatcctcaccgccgaccgcgacctctaccaactcgtctccgaccgcgtcgccgtcctccaccccgagggccacctcatcaccccggagtggctttgggagaagtacggcctcaggccggagcagtgggtggacttccgcgccctcgtgggggacccctccgacaacctccccggggtcaagggcatcggggagaagaccgccctcaagctcctcaaggagtggggaagcctggaaaacctcctcaagaacctggaccgggtaaagccagaaaacgtccgggagaagatcaaggcccacctggaagacctcaggctctccttggagctctcccgggtgcgcaccgacctccccctggaggtggacctcgcccaggggcgggagcccgaccgggaggggcttagggccttcctggagaggctggagttcggcagcctcctccacgagttcggcctcctggaggcccccgcccccctggaggaggccccctggcccccgccggaaggggccttcgtgggcttcgtcctctcccgccccgagcccatgtgggcggagcttaaagccctggccgcctgcagggacggccgggtgcaccgggcagcagaccccttggcggggctaaaggacctcaaggaggtccggggcctcctcgccaaggacctcgccgtcttggcctcgagggaggggctagacctcgtgcccggggacgaccccatgctcctcgcctacctcctggacccctccaacaccacccccgagggggtggcgcggcgctacgggggggagtggacggaggacgccgcccaccgggccctcctctcggagaggctccatcggaacctccttaagcgcctcgagggggaggagaagctcctttggctctaccacgaggtggaaaagcccctctcccgggtcctggcccacatggaggccaccggggtacggcgggacgtggcctaccttcaggccctttccctggagcttgcggaggagatccgccgcctcgaggaggaggtcttccgcttggcgggccaccccttcaacctcaactcccgggaccagctggaaagggtgctctttgacgagcttaggcttcccgccttggggaagacgcaaaagacaggcaagcgctccaccagcgccgcggtgctggaggccctacgggaggcccaccccatcgtggagaagatcctccagcaccgggagctcaccaagctcaagaacacctacgtggaccccctcccaagcctcgtccacccgaggacgggccgcctccacacccgcttcaaccagacggccacggccacggggaggcttagtagctccgaccccaacctgcagaacatccccgtccgcacccccttgggccagaggatccgccgggccttcgtggccgaggcgggttgggcgttggtggccctggactatagccagatagagctccgcgtcctcgcccacctctccggggacgaaaacctgatcagggtcttccaggaggggaaggacatccacacccagaccgcaagctggatgttcggcgtccccccggaggccgtggaccccctgatgcgccgggcggccaagacggtgaacttcggcgtcctctacggcatgtccgcccataggctctcccaggagcttgccatcccctacgaggaggcggtggcctttatagagcgctacttccaaagcttccccaaggtgcgggcctggatagaaaagaccctggaggaggggaggaagcggggctacgtggaaaccctcttcggaagaaggcgctacgtgcccgacctcaacgcccgggtgaatagcgtcagggaggccgcggagcgcatggccttcaacatgcccgtccagggcaccgccgccgacctcatgaagctcgccatggtgaagctcttcccccgcctccgggagatgggggcccgcatgctcctccaggtccacgacgagctcctcctggaggccccccaagcgcgggccgaggaggtggcggctttggccaaggaggccatggagaaggcctatcccctcgccgtgcccctggaggtggaggtggggatgggggaggactggctttccgccaagggttaggggggccctgccgtttagaggaagttcaaggggttgtccctcagaaacgcctccaggggaacgccctctgggcctaccaggaggcctttagccccaaaggtgcgggtgaaggcttccaggccctggg

SEQ ID NO: 3601 - DNA, 3221 bp, Artificial Sequence
  Description of Artificial Sequence: Synthetic DNA sequence of Thermus thermophilus DNA Polymerase K740V
tctagaggaagcatgagcctcaccctggcagacaaggtggtctacgaggaggagatccagaaaagccgcttcatcgccaaggcggcccccgtggcctcggaggaggaggccttggcgtttttggccgagaaccgggagcctgaggccacccacaacggccacgcctacaagatcggcctcctctaccgcttctctgacgacggggagccctcgggcaccgcaggcaggcccatcctccacgccatagaggcccagggcctggaccgggtggcggtcctggtggtgcgctacttcggcggggtgaagctcggggccggggggcttgtgcgggcctacgggggggtggcggcggaggccttaaggcgggcgcccaaggtccccttggtggagcgggtggggctcgccttcctcgtgcccttcgccgaggtgggccgggtctacgccctcctggaggcccgcgcccctgaaggccgaggagacctacaccccggaggcgtgcgcttcgccctcctcctccccaagcccgagcgggaaggtttcctcagggcgctcctggacgccacccggggacaggtggccctggagtagcatggaggcgatgcttccgctctttgaacccaaaggccgggtcctcctggtggacggccaccacctggcctaccgcaccttcttcgccctgaagggcctcaccacgagccggggcgaaccggtgcaggcggtctacggcttcgccaagagcctcctcaaggccctgaaggaggacgggtacaaggccgtcttcgtggtctttgacgccaaggccccctccttccgccacgaggcctacgaggcctacaaggcggggagggccccgacccccgaggacttcccccggcagctcgccctcatcaaggagctggtggacctcctggggtttacccgcctcgaggtccccggctacgaggcggacgacgttctcgccaccctggccaagaaggcggaaaaggaggggtacgaggtgcgcatcctcaccgccgaccgcgacctctaccaactcgtctccgaccgcgtcgccgtcctccaccccgagggccacctcatcaccccggagtggctttgggagaagtacggcctcaggccggagcagtgggtggacttccgcgccctcgtgggggacccctccgacaacctccccggggtcaagggcatcggggagaagaccgccctcaagctcctcaaggagtggggaagcctggaaaacctcctcaagaacctggaccgggtaaagccagaaaacgtccgggagaagatcaaggcccacctggaagacctcaggctctccttggagctctcccgggtgcgcaccgacctccccctggaggtggacctcgcccaggggcgggagcccgaccgggaggggcttagggccttcctggagaggctggagttcggcagcctcctccacgagttcggcctcctggaggcccccgcccccctggaggaggccccctggcccccgccggaaggggccttcgtgggcttcgtcctctcccgccccgagcccatgtgggcggagcttaaagccctggccgcctgcagggacggccgggtgcaccgggcagcagaccccttggcggggctaaaggacctcaaggaggtccggggcctcctcgccaaggacctcgccgtcttggcctcgagggaggggctagacctcgtgcccggggacgaccccatgctcctcgcctacctcctggacccctccaacaccacccccgagggggtggcgcggcgctacgggggggagtggacggaggacgccgcccaccgggccctcctctcggagaggctccatcggaacctccttaagcgcctcgagggggaggagaagctcctttggctctaccacgaggtggaaaagcccctctcccgggtcctggcccacatggaggccaccggggtacggcgggacgtggcctaccttcaggccctttccctggagcttgcggaggagatccgccgcctcgaggaggaggtcttccgcttggcgggccaccccttcaacctcaactcccgggaccagctggaaagggtgctctttgacgagcttaggcttcccgccttggggaagacgcaaaagacaggcaagcgctccaccagcgccgcggtgctggaggccctacgggaggcccaccccatcgtggagaagatcctccagcaccgggagctcaccaagctcaagaacacctacgtggaccccctcccaagcctcgtccacccgaggacgggccgcctccacacccgcttcaaccagacggccacggccacggggaggcttagtagctccgaccccaacctgcagaacatccccgtccgcacccccttgggccagaggatccgccgggccttcgtggccgaggcgggttgggcgttggtggccctggactatagccagatagagctccgcgtcctcgcccacctctccggggacgaaaacctgatcagggtcttccaggaggggaaggacatccacacccagaccgcaagctggatgttcggcgtccccccggaggccgtggaccccctgatgcgccgggcggccaagacggtgaacttcggcgtcctctacggcatgtccgcccataggctctcccaggagcttgccatcccctacgaggaggcggtggcctttatagagcgctacttccaaagcttccccaaggtgcgggcctggatagaaaagaccctggaggaggggaggaagcggggctacgtggaaaccctcttcggaagaaggcgctacgtgcccgacctcaacgcccgggtggtcagcgtcagggaggccgcggagcgcatggccttcaacatgcccgtccagggcaccgccgccgacctcatgaagctcgccatggtgaagctcttcccccgcctccgggagatgggggcccgcatgctcctccaggtccacgacgagctcctcctggaggccccccaagcgcgggccgaggaggtggcggctttggccaaggaggccatggagaaggcctatcccctcgccgtgcccctggaggtggaggtggggatgggggaggactggctttccgccaagggttaggggggccctgccgtttagaggaagttcaaggggttgtccctcagaaacgcctccaggggaacgccctctgggcctaccaggaggcctttagccccaaaggtgcgggtgaaggcttccaggccctggg

SEQ ID NO: 3602 - DNA, 3221 bp, Artificial Sequence
  Description of Artificial Sequence: Synthetic DNA sequence of Thermus thermophilus DNA Polymerase E744A
tctagaggaagcatgagcctcaccctggcagacaaggtggtctacgaggaggagatccagaaaagccgcttcatcgccaaggcggcccccgtggcctcggaggaggaggccttggcgtttttggccgagaaccgggagcctgaggccacccacaacggccacgcctacaagatcggcctcctctaccgcttctctgacgacggggagccctcgggcaccgcaggcaggcccatcctccacgccatagaggcccagggcctggaccgggtggcggtcctggtggtgcgctacttcggcggggtgaagctcggggccggggggcttgtgcgggcctacgggggggtggcggcggaggccttaaggcgggcgcccaaggtccccttggtggagcgggtggggctcgccttcctcgtgcccttcgccgaggtgggccgggtctacgccctcctggaggcccgcgcccctgaaggccgaggagacctacaccccggaggcgtgcgcttcgccctcctcctccccaagcccgagcgggaaggtttcctcagggcgctcctggacgccacccggggacaggtggccctggagtagcatggaggcgatgcttccgctctttgaacccaaaggccgggtcctcctggtggacggccaccacctggcctaccgcaccttcttcgccctgaagggcctcaccacgagccggggcgaaccggtgcaggcggtctacggcttcgccaagagcctcctcaaggccctgaaggaggacgggtacaaggccgtcttcgtggtctttgacgccaaggccccctccttccgccacgaggcctacgaggcctacaaggcggggagggccccgacccccgaggacttcccccggcagctcgccctcatcaaggagctggtggacctcctggggtttacccgcctcgaggtccccggctacgaggcggacgacgttctcgccaccctggccaagaaggcggaaaaggaggggtacgaggtgcgcatcctcaccgccgaccgcgacctctaccaactcgtctccgaccgcgtcgccgtcctccaccccgagggccacctcatcaccccggagtggctttgggagaagtacggcctcaggccggagcagtgggtggacttccgcgccctcgtgggggacccctccgacaacctccccggggtcaagggcatcggggagaagaccgccctcaagctcctcaaggagtggggaagcctggaaaacctcctcaagaacctggaccgggtaaagccagaaaacgtccgggagaagatcaaggcccacctggaagacctcaggctctccttggagctctcccgggtgcgcaccgacctccccctggaggtggacctcgcccaggggcgggagcccgaccgggaggggcttagggccttcctggagaggctggagttcggcagcctcctccacgagttcggcctcctggaggcccccgcccccctggaggaggccccctggcccccgccggaaggggccttcgtgggcttcgtcctctcccgccccgagcccatgtgggcggagcttaaagccctggccgcctgcagggacggccgggtgcaccgggcagcagaccccttggcggggctaaaggacctcaaggaggtccggggcctcctcgccaaggacctcgccgtcttggcctcgagggaggggctagacctcgtgcccggggacgaccccatgctcctcgcctacctcctggacccctccaacaccacccccgagggggtggcgcggcgctacgggggggagtggacggaggacgccgcccaccgggccctcctctcggagaggctccatcggaacctccttaagcgcctcgagggggaggagaagctcctttggctctaccacgaggtggaaaagcccctctcccgggtcctggcccacatggaggccaccggggtacggcgggacgtggcctaccttcaggccctttccctggagcttgcggaggagatccgccgcctcgaggaggaggtcttccgcttggcgggccaccccttcaacctcaactcccgggaccagctggaaagggtgctctttgacgagcttaggcttcccgccttggggaagacgcaaaagacaggcaagcgctccaccagcgccgcggtgctggaggccctacgggaggcccaccccatcgtggagaagatcctccagcaccgggagctcaccaagctcaagaacacctacgtggaccccctcccaagcctcgtccacccgaggacgggccgcctccacacccgcttcaaccagacggccacggccacggggaggcttagtagctccgaccccaacctgcagaacatccccgtccgcacccccttgggccagaggatccgccgggccttcgtggccgaggcgggttgggcgttggtggccctggactatagccagatagagctccgcgtcctcgcccacctctccggggacgaaaacctgatcagggtcttccaggaggggaaggacatccacacccagaccgcaagctggatgttcggcgtccccccggaggccgtggaccccctgatgcgccgggcggccaagacggtgaacttcggcgtcctctacggcatgtccgcccataggctctcccaggagcttgccatcccctacgaggaggcggtggcctttatagagcgctacttccaaagcttccccaaggtgcgggcctggatagaaaagaccctggaggaggggaggaagcggggctacgtggaaaccctcttcggaagaaggcgctacgtgcccgacctcaacgcccgggtgaagagcgtcagggctgccgcggagcgcatggccttcaacatgcccgtccagggcaccgccgccgacctcatgaagctcgccatggtgaagctcttcccccgcctccgggagatgggggcccgcatgctcctccaggtccacgacgagctcctcctggaggccccccaagcgcgggccgaggaggtggcggctttggccaaggaggccatggagaaggcctatcccctcgccgtgcccctggaggtggaggtggggatgggggaggactggctttccgccaagggttaggggggccctgccgtttagaggaagttcaaggggttgtccctcagaaacgcctccaggggaacgccctctgggcctaccaggaggcctttagccccaaaggtgcgggtgaaggcttccaggccctggg

SEQ ID NO: 3603 - DNA, 3221 bp, Artificial Sequence
  Description of Artificial Sequence: Synthetic DNA sequence of Thermus thermophilus DNA Polymerase E744R
tctagaggaagcatgagcctcaccctggcagacaaggtggtctacgaggaggagatccagaaaagccgcttcatcgccaaggcggcccccgtggcctcggaggaggaggccttggcgtttttggccgagaaccgggagcctgaggccacccacaacggccacgcctacaagatcggcctcctctaccgcttctctgacgacggggagccctcgggcaccgcaggcaggcccatcctccacgccatagaggcccagggcctggaccgggtggcggtcctggtggtgcgctacttcggcggggtgaagctcggggccggggggcttgtgcgggcctacgggggggtggcggcggaggccttaaggcgggcgcccaaggtccccttggtggagcgggtggggctcgccttcctcgtgcccttcgccgaggtgggccgggtctacgccctcctggaggcccgcgcccctgaaggccgaggagacctacaccccggaggcgtgcgcttcgccctcctcctccccaagcccgagcgggaaggtttcctcagggcgctcctggacgccacccggggacaggtggccctggagtagcatggaggcgatgcttccgctctttgaacccaaaggccgggtcctcctggtggacggccaccacctggcctaccgcaccttcttcgccctgaagggcctcaccacgagccggggcgaaccggtgcaggcggtctacggcttcgccaagagcctcctcaaggccctgaaggaggacgggtacaaggccgtcttcgtggtctttgacgccaaggccccctccttccgccacgaggcctacgaggcctacaaggcggggagggccccgacccccgaggacttcccccggcagctcgccctcatcaaggagctggtggacctcctggggtttacccgcctcgaggtccccggctacgaggcggacgacgttctcgccaccctggccaagaaggcggaaaaggaggggtacgaggtgcgcatcctcaccgccgaccgcgacctctaccaactcgtctccgaccgcgtcgccgtcctccaccccgagggccacctcatcaccccggagtggctttgggagaagtacggcctcaggccggagcagtgggtggacttccgcgccctcgtgggggacccctccgacaacctccccggggtcaagggcatcggggagaagaccgccctcaagctcctcaaggagtggggaagcctggaaaacctcctcaagaacctggaccgggtaaagccagaaaacgtccgggagaagatcaaggcccacctggaagacctcaggctctccttggagctctcccgggtgcgcaccgacctccccctggaggtggacctcgcccaggggcgggagcccgaccgggaggggcttagggccttcctggagaggctggagttcggcagcctcctccacgagttcggcctcctggaggcccccgcccccctggaggaggccccctggcccccgccggaaggggccttcgtgggcttcgtcctctcccgccccgagcccatgtgggcggagcttaaagccctggccgcctgcagggacggccgggtgcaccgggcagcagaccccttggcggggctaaaggacctcaaggaggtccggggcctcctcgccaaggacctcgccgtcttggcctcgagggaggggctagacctcgtgcccggggacgaccccatgctcctcgcctacctcctggacccctccaacaccacccccgagggggtggcgcggcgctacgggggggagtggacggaggacgccgcccaccgggccctcctctcggagaggctccatcggaacctccttaagcgcctcgagggggaggagaagctcctttggctctaccacgaggtggaaaagcccctctcccgggtcctggcccacatggaggccaccggggtacggcgggacgtggcctaccttcaggccctttccctggagcttgcggaggagatccgccgcctcgaggaggaggtcttccgcttggcgggccaccccttcaacctcaactcccgggaccagctggaaagggtgctctttgacgagcttaggcttcccgccttggggaagacgcaaaagacaggcaagcgctccaccagcgccgcggtgctggaggccctacgggaggcccaccccatcgtggagaagatcctccagcaccgggagctcaccaagctcaagaacacctacgtggaccccctcccaagcctcgtccacccgaggacgggccgcctccacacccgcttcaaccagacggccacggccacggggaggcttagtagctccgaccccaacctgcagaacatccccgtccgcacccccttgggccagaggatccgccgggccttcgtggccgaggcgggttgggcgttggtggccctggactatagccagatagagctccgcgtcctcgcccacctctccggggacgaaaacctgatcagggtcttccaggaggggaaggacatccacacccagaccgcaagctggatgttcggcgtccccccggaggccgtggaccccctgatgcgccgggcggccaagacggtgaacttcggcgtcctctacggcatgtccgcccataggctctcccaggagcttgccatcccctacgaggaggcggtggcctttatagagcgctacttccaaagcttccccaaggtgcgggcctggatagaaaagaccctggaggaggggaggaagcggggctacgtggaaaccctcttcggaagaaggcgctacgtgcccgacctcaacgcccgggtgaagagcgtcaggcgagccgcggagcgcatggccttcaacatgcccgtccagggcaccgccgccgacctcatgaagctcgccatggtgaagctcttcccccgcctccgggagatgggggcccgcatgctcctccaggtccacgacgagctcctcctggaggccccccaagcgcgggccgaggaggtggcggctttggccaaggaggccatggagaaggcctatcccctcgccgtgcccctggaggtggaggtggggatgggggaggactggctttccgccaagggttaggggggccctgccgtttagaggaagttcaaggggttgtccctcagaaacgcctccaggggaacgccctctgggcctaccaggaggcctttagccccaaaggtgcgggtgaaggcttccaggccctggg

SEQ ID NO: 3604 - DNA, 3221 bp, Artificial Sequence
  Description of Artificial Sequence: Synthetic DNA sequence of Thermus thermophilus DNA Polymerase E744C
tctagaggaagcatgagcctcaccctggcagacaaggtggtctacgaggaggagatccagaaaagccgcttcatcgccaaggcggcccccgtggcctcggaggaggaggccttggcgtttttggccgagaaccgggagcctgaggccacccacaacggccacgcctacaagatcggcctcctctaccgcttctctgacgacggggagccctcgggcaccgcaggcaggcccatcctccacgccatagaggcccagggcctggaccgggtggcggtcctggtggtgcgctacttcggcggggtgaagctcggggccggggggcttgtgcgggcctacgggggggtggcggcggaggccttaaggcgggcgcccaaggtccccttggtggagcgggtggggctcgccttcctcgtgcccttcgccgaggtgggccgggtctacgccctcctggaggcccgcgcccctgaaggccgaggagacctacaccccggaggcgtgcgcttcgccctcctcctccccaagcccgagcgggaaggtttcctcagggcgctcctggacgccacccggggacaggtggccctggagtagcatggaggcgatgcttccgctctttgaacccaaaggccgggtcctcctggtggacggccaccacctggcctaccgcaccttcttcgccctgaagggcctcaccacgagccggggcgaaccggtgcaggcggtctacggcttcgccaagagcctcctcaaggccctgaaggaggacgggtacaaggccgtcttcgtggtctttgacgccaaggccccctccttccgccacgaggcctacgaggcctacaaggcggggagggccccgacccccgaggacttcccccggcagctcgccctcatcaaggagctggtggacctcctggggtttacccgcctcgaggtccccggctacgaggcggacgacgttctcgccaccctggccaagaaggcggaaaaggaggggtacgaggtgcgcatcctcaccgccgaccgcgacctctaccaactcgtctccgaccgcgtcgccgtcctccaccccgagggccacctcatcaccccggagtggctttgggagaagtacggcctcaggccggagcagtgggtggacttccgcgccctcgtgggggacccctccgacaacctccccggggtcaagggcatcggggagaagaccgccctcaagctcctcaaggagtggggaagcctggaaaacctcctcaagaacctggaccgggtaaagccagaaaacgtccgggagaagatcaaggcccacctggaagacctcaggctctccttggagctctcccgggtgcgcaccgacctccccctggaggtggacctcgcccaggggcgggagcccgaccgggaggggcttagggccttcctggagaggctggagttcggcagcctcctccacgagttcggcctcctggaggcccccgcccccctggaggaggccccctggcccccgccggaaggggccttcgtgggcttcgtcctctcccgccccgagcccatgtgggcggagcttaaagccctggccgcctgcagggacggccgggtgcaccgggcagcagaccccttggcggggctaaaggacctcaaggaggtccggggcctcctcgccaaggacctcgccgtcttggcctcgagggaggggctagacctcgtgcccggggacgaccccatgctcctcgcctacctcctggacccctccaacaccacccccgagggggtggcgcggcgctacgggggggagtggacggaggacgccgcccaccgggccctcctctcggagaggctccatcggaacctccttaagcgcctcgagggggaggagaagctcctttggctctaccacgaggtggaaaagcccctctcccgggtcctggcccacatggaggccaccggggtacggcgggacgtggcctaccttcaggccctttccctggagcttgcggaggagatccgccgcctcgaggaggaggtcttccgcttggcgggccaccccttcaacctcaactcccgggaccagctggaaagggtgctctttgacgagcttaggcttcccgccttggggaagacgcaaaagacaggcaagcgctccaccagcgccgcggtgctggaggccctacgggaggcccaccccatcgtggagaagatcctccagcaccgggagctcaccaagctcaagaacacctacgtggaccccctcccaagcctcgtccacccgaggacgggccgcctccacacccgcttcaaccagacggccacggccacggggaggcttagtagctccgaccccaacctgcagaacatccccgtccgcacccccttgggccagaggatccgccgggccttcgtggccgaggcgggttgggcgttggtggccctggactatagccagatagagctccgcgtcctcgcccacctctccggggacgaaaacctgatcagggtcttccaggaggggaaggacatccacacccagaccgcaagctggatgttcggcgtccccccggaggccgtggaccccctgatgcgccgggcggccaagacggtgaacttcggcgtcctctacggcatgtccgcccataggctctcccaggagcttgccatcccctacgaggaggcggtggcctttatagagcgctacttccaaagcttccccaaggtgcgggcctggatagaaaagaccctggaggaggggaggaagcggggctacgtggaaaccctcttcggaagaaggcgctacgtgcccgacctcaacgcccgggtgaagagcgtcaggtgtgccgcggagcgcatggccttcaacatgcccgtccagggcaccgccgccgacctcatgaagctcgccatggtgaagctcttcccccgcctccgggagatgggggcccgcatgctcctccaggtccacgacgagctcctcctggaggccccccaagcgcgggccgaggaggtggcggctttggccaaggaggccatggagaaggcctatcccctcgccgtgcccctggaggtggaggtggggatgggggaggactggctttccgccaagggttaggggggccctgccgtttagaggaagttcaaggggttgtccctcagaaacgcctccaggggaacgccctctgggcctaccaggaggcctttagccccaaaggtgcgggtgaaggcttccaggccctggg

SEQ ID NO: 3605 - DNA, 3221 bp, Artificial Sequence
  Description of Artificial Sequence: Synthetic DNA sequence of Thermus thermophilus DNA Polymerase E744G
tctagaggaagcatgagcctcaccctggcagacaaggtggtctacgaggaggagatccagaaaagccgcttcatcgccaaggcggcccccgtggcctcggaggaggaggccttggcgtttttggccgagaaccgggagcctgaggccacccacaacggccacgcctacaagatcggcctcctctaccgcttctctgacgacggggagccctcgggcaccgcaggcaggcccatcctccacgccatagaggcccagggcctggaccgggtggcggtcctggtggtgcgctacttcggcggggtgaagctcggggccggggggcttgtgcgggcctacgggggggtggcggcggaggccttaaggcgggcgcccaaggtccccttggtggagcgggtggggctcgccttcctcgtgcccttcgccgaggtgggccgggtctacgccctcctggaggcccgcgcccctgaaggccgaggagacctacaccccggaggcgtgcgcttcgccctcctcctccccaagcccgagcgggaaggtttcctcagggcgctcctggacgccacccggggacaggtggccctggagtagcatggaggcgatgcttccgctctttgaacccaaaggccgggtcctcctggtggacggccaccacctggcctaccgcaccttcttcgccctgaagggcctcaccacgagccggggcgaaccggtgcaggcggtctacggcttcgccaagagcctcctcaaggccctgaaggaggacgggtacaaggccgtcttcgtggtctttgacgccaaggccccctccttccgccacgaggcctacgaggcctacaaggcggggagggccccgacccccgaggacttcccccggcagctcgccctcatcaaggagctggtggacctcctggggtttacccgcctcgaggtccccggctacgaggcggacgacgttctcgccaccctggccaagaaggcggaaaaggaggggtacgaggtgcgcatcctcaccgccgaccgcgacctctaccaactcgtctccgaccgcgtcgccgtcctccaccccgagggccacctcatcaccccggagtggctttgggagaagtacggcctcaggccggagcagtgggtggacttccgcgccctcgtgggggacccctccgacaacctccccggggtcaagggcatcggggagaagaccgccctcaagctcctcaaggagtggggaagcctggaaaacctcctcaagaacctggaccgggtaaagccagaaaacgtccgggagaagatcaaggcccacctggaagacctcaggctctccttggagctctcccgggtgcgcaccgacctccccctggaggtggacctcgcccaggggcgggagcccgaccgggaggggcttagggccttcctggagaggctggagttcggcagcctcctccacgagttcggcctcctggaggcccccgcccccctggaggaggccccctggcccccgccggaaggggccttcgtgggcttcgtcctctcccgccccgagcccatgtgggcggagcttaaagccctggccgcctgcagggacggccgggtgcaccgggcagcagaccccttggcggggctaaaggacctcaaggaggtccggggcctcctcgccaaggacctcgccgtcttggcctcgagggaggggctagacctcgtgcccggggacgaccccatgctcctcgcctacctcctggacccctccaacaccacccccgagggggtggcgcggcgctacgggggggagtggacggaggacgccgcccaccgggccctcctctcggagaggctccatcggaacctccttaagcgcctcgagggggaggagaagctcctttggctctaccacgaggtggaaaagcccctctcccgggtcctggcccacatggaggccaccggggtacggcgggacgtggcctaccttcaggccctttccctggagcttgcggaggagatccgccgcctcgaggaggaggtcttccgcttggcgggccaccccttcaacctcaactcccgggaccagctggaaagggtgctctttgacgagcttaggcttcccgccttggggaagacgcaaaagacaggcaagcgctccaccagcgccgcggtgctggaggccctacgggaggcccaccccatcgtggagaagatcctccagcaccgggagctcaccaagctcaagaacacctacgtggaccccctcccaagcctcgtccacccgaggacgggccgcctccacacccgcttcaaccagacggccacggccacggggaggcttagtagctccgaccccaacctgcagaacatccccgtccgcacccccttgggccagaggatccgccgggccttcgtggccgaggcgggttgggcgttggtggccctggactatagccagatagagctccgcgtcctcgcccacctctccggggacgaaaacctgatcagggtcttccaggaggggaaggacatccacacccagaccgcaagctggatgttcggcgtccccccggaggccgtggaccccctgatgcgccgggcggccaagacggtgaacttcggcgtcctctacggcatgtccgcccataggctctcccaggagcttgccatcccctacgaggaggcggtggcctttatagagcgctacttccaaagcttccccaaggtgcgggcctggatagaaaagaccctggaggaggggaggaagcggggctacgtggaaaccctcttcggaagaaggcgctacgtgcccgacctcaacgcccgggtgaagagcgtcaggggtgccgcggagcgcatggccttcaacatgcccgtccagggcaccgccgccgacctcatgaagctcgccatggtgaagctcttcccccgcctccgggagatgggggcccgcatgctcctccaggtccacgacgagctcctcctggaggccccccaagcgcgggccgaggaggtggcggctttggccaaggaggccatggagaaggcctatcccctcgccgtgcccctggaggtggaggtggggatgggggaggactggctttccgccaagggttaggggggccctgccgtttagaggaagttcaaggggttgtccctcagaaacgcctccaggggaacgccctctgggcctaccaggaggcctttagccccaaaggtgcgggtgaaggcttccaggccctggg

SEQ ID NO: 3606 - DNA, 3221 bp, Artificial Sequence
  Description of Artificial Sequence: Synthetic DNA sequence of Thermus thermophilus DNA Polymerase E744Q
tctagaggaagcatgagcctcaccctggcagacaaggtggtctacgaggaggagatccagaaaagccgcttcatcgccaaggcggcccccgtggcctcggaggaggaggccttggcgtttttggccgagaaccgggagcctgaggccacccacaacggccacgcctacaagatcggcctcctctaccgcttctctgacgacggggagccctcgggcaccgcaggcaggcccatcctccacgccatagaggcccagggcctggaccgggtggcggtcctggtggtgcgctacttcggcggggtgaagctcggggccggggggcttgtgcgggcctacgggggggtggcggcggaggccttaaggcgggcgcccaaggtccccttggtggagcgggtggggctcgccttcctcgtgcccttcgccgaggtgggccgggtctacgccctcctggaggcccgcgcccctgaaggccgaggagacctacaccccggaggcgtgcgcttcgccctcctcctccccaagcccgagcgggaaggtttcctcagggcgctcctggacgccacccggggacaggtggccctggagtagcatggaggcgatgcttccgctctttgaacccaaaggccgggtcctcctggtggacggccaccacctggcctaccgcaccttcttcgccctgaagggcctcaccacgagccggggcgaaccggtgcaggcggtctacggcttcgccaagagcctcctcaaggccctgaaggaggacgggtacaaggccgtcttcgtggtctttgacgccaaggccccctccttccgccacgaggcctacgaggcctacaaggcggggagggccccgacccccgaggacttcccccggcagctcgccctcatcaaggagctggtggacctcctggggtttacccgcctcgaggtccccggctacgaggcggacgacgttctcgccaccctggccaagaaggcggaaaaggaggggtacgaggtgcgcatcctcaccgccgaccgcgacctctaccaactcgtctccgaccgcgtcgccgtcctccaccccgagggccacctcatcaccccggagtggctttgggagaagtacggcctcaggccggagcagtgggtggacttccgcgccctcgtgggggacccctccgacaacctccccggggtcaagggcatcggggagaagaccgccctcaagctcctcaaggagtggggaagcctggaaaacctcctcaagaacctggaccgggtaaagccagaaaacgtccgggagaagatcaaggcccacctggaagacctcaggctctccttggagctctcccgggtgcgcaccgacctccccctggaggtggacctcgcccaggggcgggagcccgaccgggaggggcttagggccttcctggagaggctggagttcggcagcctcctccacgagttcggcctcctggaggcccccgcccccctggaggaggccccctggcccccgccggaaggggccttcgtgggcttcgtcctctcccgccccgagcccatgtgggcggagcttaaagccctggccgcctgcagggacggccgggtgcaccgggcagcagaccccttggcggggctaaaggacctcaaggaggtccggggcctcctcgccaaggacctcgccgtcttggcctcgagggaggggctagacctcgtgcccggggacgaccccatgctcctcgcctacctcctggacccctccaacaccacccccgagggggtggcgcggcgctacgggggggagtggacggaggacgccgcccaccgggccctcctctcggagaggctccatcggaacctccttaagcgcctcgagggggaggagaagctcctttggctctaccacgaggtggaaaagcccctctcccgggtcctggcccacatggaggccaccggggtacggcgggacgtggcctaccttcaggccctttccctggagcttgcggaggagatccgccgcctcgaggaggaggtcttccgcttggcgggccaccccttcaacctcaactcccgggaccagctggaaagggtgctctttgacgagcttaggcttcccgccttggggaagacgcaaaagacaggcaagcgctccaccagcgccgcggtgctggaggccctacgggaggcccaccccatcgtggagaagatcctccagcaccgggagctcaccaagctcaagaacacctacgtggaccccctcccaagcctcgtccacccgaggacgggccgcctccacacccgcttcaaccagacggccacggccacggggaggcttagtagctccgaccccaacctgcagaacatccccgtccgcacccccttgggccagaggatccgccgggccttcgtggccgaggcgggttgggcgttggtggccctggactatagccagatagagctccgcgtcctcgcccacctctccggggacgaaaacctgatcagggtcttccaggaggggaaggacatccacacccagaccgcaagctggatgttcggcgtccccccggaggccgtggaccccctgatgcgccgggcggccaagacggtgaacttcggcgtcctctacggcatgtccgcccataggctctcccaggagcttgccatcccctacgaggaggcggtggcctttatagagcgctacttccaaagcttccccaaggtgcgggcctggatagaaaagaccctggaggaggggaggaagcggggctacgtggaaaccctcttcggaagaaggcgctacgtgcccgacctcaacgcccgggtgaagagcgtcaggcaagccgcggagcgcatggccttcaacatgcccgtccagggcaccgccgccgacctcatgaagctcgccatggtgaagctcttcccccgcctccgggagatgggggcccgcatgctcctccaggtccacgacgagctcctcctggaggccccccaagcgcgggccgaggaggtggcggctttggccaaggaggccatggagaaggcctatcccctcgccgtgcccctggaggtggaggtggggatgggggaggactggctttccgccaagggttaggggggccctgccgtttagaggaagttcaaggggttgtccctcagaaacgcctccaggggaacgccctctgggcctaccaggaggcctttagccccaaaggtgcgggtgaaggcttccaggccctggg

SEQ ID NO: 3607 - DNA, 3221 bp, Artificial Sequence
  Description of Artificial Sequence: Synthetic DNA sequence of Thermus thermophilus DNA Polymerase E744H
tctagaggaagcatgagcctcaccctggcagacaaggtggtctacgaggaggagatccagaaaagccgcttcatcgccaaggcggcccccgtggcctcggaggaggaggccttggcgtttttggccgagaaccgggagcctgaggccacccacaacggccacgcctacaagatcggcctcctctaccgcttctctgacgacggggagccctcgggcaccgcaggcaggcccatcctccacgccatagaggcccagggcctggaccgggtggcggtcctggtggtgcgctacttcggcggggtgaagctcggggccggggggcttgtgcgggcctacgggggggtggcggcggaggccttaaggcgggcgcccaaggtccccttggtggagcgggtggggctcgccttcctcgtgcccttcgccgaggtgggccgggtctacgccctcctggaggcccgcgcccctgaaggccgaggagacctacaccccggaggcgtgcgcttcgccctcctcctccccaagcccgagcgggaaggtttcctcagggcgctcctggacgccacccggggacaggtggccctggagtagcatggaggcgatgcttccgctctttgaacccaaaggccgggtcctcctggtggacggccaccacctggcctaccgcaccttcttcgccctgaagggcctcaccacgagccggggcgaaccggtgcaggcggtctacggcttcgccaagagcctcctcaaggccctgaaggaggacgggtacaaggccgtcttcgtggtctttgacgccaaggccccctccttccgccacgaggcctacgaggcctacaaggcggggagggccccgacccccgaggacttcccccggcagctcgccctcatcaaggagctggtggacctcctggggtttacccgcctcgaggtccccggctacgaggcggacgacgttctcgccaccctggccaagaaggcggaaaaggaggggtacgaggtgcgcatcctcaccgccgaccgcgacctctaccaactcgtctccgaccgcgtcgccgtcctccaccccgagggccacctcatcaccccggagtggctttgggagaagtacggcctcaggccggagcagtgggtggacttccgcgccctcgtgggggacccctccgacaacctccccggggtcaagggcatcggggagaagaccgccctcaagctcctcaaggagtggggaagcctggaaaacctcctcaagaacctggaccgggtaaagccagaaaacgtccgggagaagatcaaggcccacctggaagacctcaggctctccttggagctctcccgggtgcgcaccgacctccccctggaggtggacctcgcccaggggcgggagcccgaccgggaggggcttagggccttcctggagaggctggagttcggcagcctcctccacgagttcggcctcctggaggcccccgcccccctggaggaggccccctggcccccgccggaaggggccttcgtgggcttcgtcctctcccgccccgagcccatgtgggcggagcttaaagccctggccgcctgcagggacggccgggtgcaccgggcagcagaccccttggcggggctaaaggacctcaaggaggtccggggcctcctcgccaaggacctcgccgtcttggcctcgagggaggggctagacctcgtgcccggggacgaccccatgctcctcgcctacctcctggacccctccaacaccacccccgagggggtggcgcggcgctacgggggggagtggacggaggacgccgcccaccgggccctcctctcggagaggctccatcggaacctccttaagcgcctcgagggggaggagaagctcctttggctctaccacgaggtggaaaagcccctctcccgggtcctggcccacatggaggccaccggggtacggcgggacgtggcctaccttcaggccctttccctggagcttgcggaggagatccgccgcctcgaggaggaggtcttccgcttggcgggccaccccttcaacctcaactcccgggaccagctggaaagggtgctctttgacgagcttaggcttcccgccttggggaagacgcaaaagacaggcaagcgctccaccagcgccgcggtgctggaggccctacgggaggcccaccccatcgtggagaagatcctccagcaccgggagctcaccaagctcaagaacacctacgtggaccccctcccaagcctcgtccacccgaggacgggccgcctccacacccgcttcaaccagacggccacggccacggggaggcttagtagctccgaccccaacctgcagaacatccccgtccgcacccccttgggccagaggatccgccgggccttcgtggccgaggcgggttgggcgttggtggccctggactatagccagatagagctccgcgtcctcgcccacctctccggggacgaaaacctgatcagggtcttccaggaggggaaggacatccacacccagaccgcaagctggatgttcggcgtccccccggaggccgtggaccccctgatgcgccgggcggccaagacggtgaacttcggcgtcctctacggcatgtccgcccataggctctcccaggagcttgccatcccctacgaggaggcggtggcctttatagagcgctacttccaaagcttccccaaggtgcgggcctggatagaaaagaccctggaggaggggaggaagcggggctacgtggaaaccctcttcggaagaaggcgctacgtgcccgacctcaacgcccgggtgaagagcgtcaggcatgccgcggagcgcatggccttcaacatgcccgtccagggcaccgccgccgacctcatgaagctcgccatggtgaagctcttcccccgcctccgggagatgggggcccgcatgctcctccaggtccacgacgagctcctcctggaggccccccaagcgcgggccgaggaggtggcggctttggccaaggaggccatggagaaggcctatcccctcgccgtgcccctggaggtggaggtggggatgggggaggactggctttccgccaagggttaggggggccctgccgtttagaggaagttcaaggggttgtccctcagaaacgcctccaggggaacgccctctgggcctaccaggaggcctttagccccaaaggtgcgggtgaaggcttccaggccctggg

SEQ ID NO: 3608 - DNA, 3221 bp, Artificial Sequence
  Description of Artificial Sequence: Synthetic DNA sequence of Thermus thermophilus DNA Polymerase E744I
tctagaggaagcatgagcctcaccctggcagacaaggtggtctacgaggaggagatccagaaaagccgcttcatcgccaaggcggcccccgtggcctcggaggaggaggccttggcgtttttggccgagaaccgggagcctgaggccacccacaacggccacgcctacaagatcggcctcctctaccgcttctctgacgacggggagccctcgggcaccgcaggcaggcccatcctccacgccatagaggcccagggcctggaccgggtggcggtcctggtggtgcgctacttcggcggggtgaagctcggggccggggggcttgtgcgggcctacgggggggtggcggcggaggccttaaggcgggcgcccaaggtccccttggtggagcgggtggggctcgccttcctcgtgcccttcgccgaggtgggccgggtctacgccctcctggaggcccgcgcccctgaaggccgaggagacctacaccccggaggcgtgcgcttcgccctcctcctccccaagcccgagcgggaaggtttcctcagggcgctcctggacgccacccggggacaggtggccctggagtagcatggaggcgatgcttccgctctttgaacccaaaggccgggtcctcctggtggacggccaccacctggcctaccgcaccttcttcgccctgaagggcctcaccacgagccggggcgaaccggtgcaggcggtctacggcttcgccaagagcctcctcaaggccctgaaggaggacgggtacaaggccgtcttcgtggtctttgacgccaaggccccctccttccgccacgaggcctacgaggcctacaaggcggggagggccccgacccccgaggacttcccccggcagctcgccctcatcaaggagctggtggacctcctggggtttacccgcctcgaggtccccggctacgaggcggacgacgttctcgccaccctggccaagaaggcggaaaaggaggggtacgaggtgcgcatcctcaccgccgaccgcgacctctaccaactcgtctccgaccgcgtcgccgtcctccaccccgagggccacctcatcaccccggagtggctttgggagaagtacggcctcaggccggagcagtgggtggacttccgcgccctcgtgggggacccctccgacaacctccccggggtcaagggcatcggggagaagaccgccctcaagctcctcaaggagtggggaagcctggaaaacctcctcaagaacctggaccgggtaaagccagaaaacgtccgggagaagatcaaggcccacctggaagacctcaggctctccttggagctctcccgggtgcgcaccgacctccccctggaggtggacctcgcccaggggcgggagcccgaccgggaggggcttagggccttcctggagaggctggagttcggcagcctcctccacgagttcggcctcctggaggcccccgcccccctggaggaggccccctggcccccgccggaaggggccttcgtgggcttcgtcctctcccgccccgagcccatgtgggcggagcttaaagccctggccgcctgcagggacggccgggtgcaccgggcagcagaccccttggcggggctaaaggacctcaaggaggtccggggcctcctcgccaaggacctcgccgtcttggcctcgagggaggggctagacctcgtgcccggggacgaccccatgctcctcgcctacctcctggacccctccaacaccacccccgagggggtggcgcggcgctacgggggggagtggacggaggacgccgcccaccgggccctcctctcggagaggctccatcggaacctccttaagcgcctcgagggggaggagaagctcctttggctctaccacgaggtggaaaagcccctctcccgggtcctggcccacatggaggccaccggggtacggcgggacgtggcctaccttcaggccctttccctggagcttgcggaggagatccgccgcctcgaggaggaggtcttccgcttggcgggccaccccttcaacctcaactcccgggaccagctggaaagggtgctctttgacgagcttaggcttcccgccttggggaagacgcaaaagacaggcaagcgctccaccagcgccgcggtgctggaggccctacgggaggcccaccccatcgtggagaagatcctccagcaccgggagctcaccaagctcaagaacacctacgtggaccccctcccaagcctcgtccacccgaggacgggccgcctccacacccgcttcaaccagacggccacggccacggggaggcttagtagctccgaccccaacctgcagaacatccccgtccgcacccccttgggccagaggatccgccgggccttcgtggccgaggcgggttgggcgttggtggccctggactatagccagatagagctccgcgtcctcgcccacctctccggggacgaaaacctgatcagggtcttccaggaggggaaggacatccacacccagaccgcaagctggatgttcggcgtccccccggaggccgtggaccccctgatgcgccgggcggccaagacggtgaacttcggcgtcctctacggcatgtccgcccataggctctcccaggagcttgccatcccctacgaggaggcggtggcctttatagagcgctacttccaaagcttccccaaggtgcgggcctggatagaaaagaccctggaggaggggaggaagcggggctacgtggaaaccctcttcggaagaaggcgctacgtgcccgacctcaacgcccgggtgaagagcgtcaggattgccgcggagcgcatggccttcaacatgcccgtccagggcaccgccgccgacctcatgaagctcgccatggtgaagctcttcccccgcctccgggagatgggggcccgcatgctcctccaggtccacgacgagctcctcctggaggccccccaagcgcgggccgaggaggtggcggctttggccaaggaggccatggagaaggcctatcccctcgccgtgcccctggaggtggaggtggggatgggggaggactggctttccgccaagggttaggggggccctgccgtttagaggaagttcaaggggttgtccctcagaaacgcctccaggggaacgccctctgggcctaccaggaggcctttagccccaaaggtgcgggtgaaggcttccaggccctggg

SEQ ID NO: 3609 - DNA, 3221 bp, Artificial Sequence
  Description of Artificial Sequence: Synthetic DNA sequence of Thermus thermophilus DNA Polymerase E744L
tctagaggaagcatgagcctcaccctggcagacaaggtggtctacgaggaggagatccagaaaagccgcttcatcgccaaggcggcccccgtggcctcggaggaggaggccttggcgtttttggccgagaaccgggagcctgaggccacccacaacggccacgcctacaagatcggcctcctctaccgcttctctgacgacggggagccctcgggcaccgcaggcaggcccatcctccacgccatagaggcccagggcctggaccgggtggcggtcctggtggtgcgctacttcggcggggtgaagctcggggccggggggcttgtgcgggcctacgggggggtggcggcggaggccttaaggcgggcgcccaaggtccccttggtggagcgggtggggctcgccttcctcgtgcccttcgccgaggtgggccgggtctacgccctcctggaggcccgcgcccctgaaggccgaggagacctacaccccggaggcgtgcgcttcgccctcctcctccccaagcccgagcgggaaggtttcctcagggcgctcctggacgccacccggggacaggtggccctggagtagcatggaggcgatgcttccgctctttgaacccaaaggccgggtcctcctggtggacggccaccacctggcctaccgcaccttcttcgccctgaagggcctcaccacgagccggggcgaaccggtgcaggcggtctacggcttcgccaagagcctcctcaaggccctgaaggaggacgggtacaaggccgtcttcgtggtctttgacgccaaggccccctccttccgccacgaggcctacgaggcctacaaggcggggagggccccgacccccgaggacttcccccggcagctcgccctcatcaaggagctggtggacctcctggggtttacccgcctcgaggtccccggctacgaggcggacgacgttctcgccaccctggccaagaaggcggaaaaggaggggtacgaggtgcgcatcctcaccgccgaccgcgacctctaccaactcgtctccgaccgcgtcgccgtcctccaccccgagggccacctcatcaccccggagtggctttgggagaagtacggcctcaggccggagcagtgggtggacttccgcgccctcgtgggggacccctccgacaacctccccggggtcaagggcatcggggagaagaccgccctcaagctcctcaaggagtggggaagcctggaaaacctcctcaagaacctggaccgggtaaagccagaaaacgtccgggagaagatcaaggcccacctggaagacctcaggctctccttggagctctcccgggtgcgcaccgacctccccctggaggtggacctcgcccaggggcgggagcccgaccgggaggggcttagggccttcctggagaggctggagttcggcagcctcctccacgagttcggcctcctggaggcccccgcccccctggaggaggccccctggcccccgccggaaggggccttcgtgggcttcgtcctctcccgccccgagcccatgtgggcggagcttaaagccctggccgcctgcagggacggccgggtgcaccgggcagcagaccccttggcggggctaaaggacctcaaggaggtccggggcctcctcgccaaggacctcgccgtcttggcctcgagggaggggctagacctcgtgcccggggacgaccccatgctcctcgcctacctcctggacccctccaacaccacccccgagggggtggcgcggcgctacgggggggagtggacggaggacgccgcccaccgggccctcctctcggagaggctccatcggaacctccttaagcgcctcgagggggaggagaagctcctttggctctaccacgaggtggaaaagcccctctcccgggtcctggcccacatggaggccaccggggtacggcgggacgtggcctaccttcaggccctttccctggagcttgcggaggagatccgccgcctcgaggaggaggtcttccgcttggcgggccaccccttcaacctcaactcccgggaccagctggaaagggtgctctttgacgagcttaggcttcccgccttggggaagacgcaaaagacaggcaagcgctccaccagcgccgcggtgctggaggccctacgggaggcccaccccatcgtggagaagatcctccagcaccgggagctcaccaagctcaagaacacctacgtggaccccctcccaagcctcgtccacccgaggacgggccgcctccacacccgcttcaaccagacggccacggccacggggaggcttagtagctccgaccccaacctgcagaacatccccgtccgcacccccttgggccagaggatccgccgggccttcgtggccgaggcgggttgggcgttggtggccctggactatagccagatagagctccgcgtcctcgcccacctctccggggacgaaaacctgatcagggtcttccaggaggggaaggacatccacacccagaccgcaagctggatgttcggcgtccccccggaggccgtggaccccctgatgcgccgggcggccaagacggtgaacttcggcgtcctctacggcatgtccgcccataggctctcccaggagcttgccatcccctacgaggaggcggtggcctttatagagcgctacttccaaagcttccccaaggtgcgggcctggatagaaaagaccctggaggaggggaggaagcggggctacgtggaaaccctcttcggaagaaggcgctacgtgcccgacctcaacgcccgggtgaagagcgtcaggttagccgcggagcgcatggccttcaacatgcccgtccagggcaccgccgccgacctcatgaagctcgccatggtgaagctcttcccccgcctccgggagatgggggcccgcatgctcctccaggtccacgacgagctcctcctggaggccccccaagcgcgggccgaggaggtggcggctttggccaaggaggccatggagaaggcctatcccctcgccgtgcccctggaggtggaggtggggatgggggaggactggctttccgccaagggttaggggggccctgccgtttagaggaagttcaaggggttgtccctcagaaacgcctccaggggaacgccctctgggcctaccaggaggcctttagccccaaaggtgcgggtgaaggcttccaggccctggg

SEQ ID NO: 3610 - DNA, 3221 bp, Artificial Sequence
  Description of Artificial Sequence: Synthetic DNA sequence of Thermus thermophilus DNA Polymerase E744K
tctagaggaagcatgagcctcaccctggcagacaaggtggtctacgaggaggagatccagaaaagccgcttcatcgccaaggcggcccccgtggcctcggaggaggaggccttggcgtttttggccgagaaccgggagcctgaggccacccacaacggccacgcctacaagatcggcctcctctaccgcttctctgacgacggggagccctcgggcaccgcaggcaggcccatcctccacgccatagaggcccagggcctggaccgggtggcggtcctggtggtgcgctacttcggcggggtgaagctcggggccggggggcttgtgcgggcctacgggggggtggcggcggaggccttaaggcgggcgcccaaggtccccttggtggagcgggtggggctcgccttcctcgtgcccttcgccgaggtgggccgggtctacgccctcctggaggcccgcgcccctgaaggccgaggagacctacaccccggaggcgtgcgcttcgccctcctcctccccaagcccgagcgggaaggtttcctcagggcgctcctggacgccacccggggacaggtggccctggagtagcatggaggcgatgcttccgctctttgaacccaaaggccgggtcctcctggtggacggccaccacctggcctaccgcaccttcttcgccctgaagggcctcaccacgagccggggcgaaccggtgcaggcggtctacggcttcgccaagagcctcctcaaggccctgaaggaggacgggtacaaggccgtcttcgtggtctttgacgccaaggccccctccttccgccacgaggcctacgaggcctacaaggcggggagggccccgacccccgaggacttcccccggcagctcgccctcatcaaggagctggtggacctcctggggtttacccgcctcgaggtccccggctacgaggcggacgacgttctcgccaccctggccaagaaggcggaaaaggaggggtacgaggtgcgcatcctcaccgccgaccgcgacctctaccaactcgtctccgaccgcgtcgccgtcctccaccccgagggccacctcatcaccccggagtggctttgggagaagtacggcctcaggccggagcagtgggtggacttccgcgccctcgtgggggacccctccgacaacctccccggggtcaagggcatcggggagaagaccgccctcaagctcctcaaggagtggggaagcctggaaaacctcctcaagaacctggaccgggtaaagccagaaaacgtccgggagaagatcaaggcccacctggaagacctcaggctctccttggagctctcccgggtgcgcaccgacctccccctggaggtggacctcgcccaggggcgggagcccgaccgggaggggcttagggccttcctggagaggctggagttcggcagcctcctccacgagttcggcctcctggaggcccccgcccccctggaggaggccccctggcccccgccggaaggggccttcgtgggcttcgtcctctcccgccccgagcccatgtgggcggagcttaaagccctggccgcctgcagggacggccgggtgcaccgggcagcagaccccttggcggggctaaaggacctcaaggaggtccggggcctcctcgccaaggacctcgccgtcttggcctcgagggaggggctagacctcgtgcccggggacgaccccatgctcctcgcctacctcctggacccctccaacaccacccccgagggggtggcgcggcgctacgggggggagtggacggaggacgccgcccaccgggccctcctctcggagaggctccatcggaacctccttaagcgcctcgagggggaggagaagctcctttggctctaccacgaggtggaaaagcccctctcccgggtcctggcccacatggaggccaccggggtacggcgggacgtggcctaccttcaggccctttccctggagcttgcggaggagatccgccgcctcgaggaggaggtcttccgcttggcgggccaccccttcaacctcaactcccgggaccagctggaaagggtgctctttgacgagcttaggcttcccgccttggggaagacgcaaaagacaggcaagcgctccaccagcgccgcggtgctggaggccctacgggaggcccaccccatcgtggagaagatcctccagcaccgggagctcaccaagctcaagaacacctacgtggaccccctcccaagcctcgtccacccgaggacgggccgcctccacacccgcttcaaccagacggccacggccacggggaggcttagtagctccgaccccaacctgcagaacatccccgtccgcacccccttgggccagaggatccgccgggccttcgtggccgaggcgggttgggcgttggtggccctggactatagccagatagagctccgcgtcctcgcccacctctccggggacgaaaacctgatcagggtcttccaggaggggaaggacatccacacccagaccgcaagctggatgttcggcgtccccccggaggccgtggaccccctgatgcgccgggcggccaagacggtgaacttcggcgtcctctacggcatgtccgcccataggctctcccaggagcttgccatcccctacgaggaggcggtggcctttatagagcgctacttccaaagcttccccaaggtgcgggcctggatagaaaagaccctggaggaggggaggaagcggggctacgtggaaaccctcttcggaagaaggcgctacgtgcccgacctcaacgcccgggtgaagagcgtcaggaaagccgcggagcgcatggccttcaacatgcccgtccagggcaccgccgccgacctcatgaagctcgccatggtgaagctcttcccccgcctccgggagatgggggcccgcatgctcctccaggtccacgacgagctcctcctggaggccccccaagcgcgggccgaggaggtggcggctttggccaaggaggccatggagaaggcctatcccctcgccgtgcccctggaggtggaggtggggatgggggaggactggctttccgccaagggttaggggggccctgccgtttagaggaagttcaaggggttgtccctcagaaacgcctccaggggaacgccctctgggcctaccaggaggcctttagccccaaaggtgcgggtgaaggcttccaggccctggg

SEQ ID NO: 3611 - DNA, 3221 bp, Artificial Sequence
  Description of Artificial Sequence: Synthetic DNA sequence of Thermus thermophilus DNA Polymerase E744D
tctagaggaagcatgagcctcaccctggcagacaaggtggtctacgaggaggagatccagaaaagccgcttcatcgccaaggcggcccccgtggcctcggaggaggaggccttggcgtttttggccgagaaccgggagcctgaggccacccacaacggccacgcctacaagatcggcctcctctaccgcttctctgacgacggggagccctcgggcaccgcaggcaggcccatcctccacgccatagaggcccagggcctggaccgggtggcggtcctggtggtgcgctacttcggcggggtgaagctcggggccggggggcttgtgcgggcctacgggggggtggcggcggaggccttaaggcgggcgcccaaggtccccttggtggagcgggtggggctcgccttcctcgtgcccttcgccgaggtgggccgggtctacgccctcctggaggcccgcgcccctgaaggccgaggagacctacaccccggaggcgtgcgcttcgccctcctcctccccaagcccgagcgggaaggtttcctcagggcgctcctggacgccacccggggacaggtggccctggagtagcatggaggcgatgcttccgctctttgaacccaaaggccgggtcctcctggtggacggccaccacctggcctaccgcaccttcttcgccctgaagggcctcaccacgagccggggcgaaccggtgcaggcggtctacggcttcgccaagagcctcctcaaggccctgaaggaggacgggtacaaggccgtcttcgtggtctttgacgccaaggccccctccttccgccacgaggcctacgaggcctacaaggcggggagggccccgacccccgaggacttcccccggcagctcgccctcatcaaggagctggtggacctcctggggtttacccgcctcgaggtccccggctacgaggcggacgacgttctcgccaccctggccaagaaggcggaaaaggaggggtacgaggtgcgcatcctcaccgccgaccgcgacctctaccaactcgtctccgaccgcgtcgccgtcctccaccccgagggccacctcatcaccccggagtggctttgggagaagtacggcctcaggccggagcagtgggtggacttccgcgccctcgtgggggacccctccgacaacctccccggggtcaagggcatcggggagaagaccgccctcaagctcctcaaggagtggggaagcctggaaaacctcctcaagaacctggaccgggtaaagccagaaaacgtccgggagaagatcaaggcccacctggaagacctcaggctctccttggagctctcccgggtgcgcaccgacctccccctggaggtggacctcgcccaggggcgggagcccgaccgggaggggcttagggccttcctggagaggctggagttcggcagcctcctccacgagttcggcctcctggaggcccccgcccccctggaggaggccccctggcccccgccggaaggggccttcgtgggcttcgtcctctcccgccccgagcccatgtgggcggagcttaaagccctggccgcctgcagggacggccgggtgcaccgggcagcagaccccttggcggggctaaaggacctcaaggaggtccggggcctcctcgccaaggacctcgccgtcttggcctcgagggaggggctagacctcgtgcccggggacgaccccatgctcctcgcctacctcctggacccctccaacaccacccccgagggggtggcgcggcgctacgggggggagtggacggaggacgccgcccaccgggccctcctctcggagaggctccatcggaacctccttaagcgcctcgagggggaggagaagctcctttggctctaccacgaggtggaaaagcccctctcccgggtcctggcccacatggaggccaccggggtacggcgggacgtggcctaccttcaggccctttccctggagcttgcggaggagatccgccgcctcgaggaggaggtcttccgcttggcgggccaccccttcaacctcaactcccgggaccagctggaaagggtgctctttgacgagcttaggcttcccgccttggggaagacgcaaaagacaggcaagcgctccaccagcgccgcggtgctggaggccctacgggaggcccaccccatcgtggagaagatcctccagcaccgggagctcaccaagctcaagaacacctacgtggaccccctcccaagcctcgtccacccgaggacgggccgcctccacacccgcttcaaccagacggccacggccacggggaggcttagtagctccgaccccaacctgcagaacatccccgtccgcacccccttgggccagaggatccgccgggccttcgtggccgaggcgggttgggcgttggtggccctggactatagccagatagagctccgcgtcctcgcccacctctccggggacgaaaacctgatcagggtcttccaggaggggaaggacatccacacccagaccgcaagctggatgttcggcgtccccccggaggccgtggaccccctgatgcgccgggcggccaagacggtgaacttcggcgtcctctacggcatgtccgcccataggctctcccaggagcttgccatcccctacgaggaggcggtggcctttatagagcgctacttccaaagcttccccaaggtgcgggcctggatagaaaagaccctggaggaggggaggaagcggggctacgtggaaaccctcttcggaagaaggcgctacgtgcccgacctcaacgcccgggtgaagagcgtcagggatgccgcggagcgcatggccttcaacatgcccgtccagggcaccgccgccgacctcatgaagctcgccatggtgaagctcttcccccgcctccgggagatgggggcccgcatgctcctccaggtccacgacgagctcctcctggaggccccccaagcgcgggccgaggaggtggcggctttggccaaggaggccatggagaaggcctatcccctcgccgtgcccctggaggtggaggtggggatgggggaggactggctttccgccaagggttaggggggccctgccgtttagaggaagttcaaggggttgtccctcagaaacgcctccaggggaacgccctctgggcctaccaggaggcctttagccccaaaggtgcgggtgaaggcttccaggccctggg

SEQ ID NO: 3612 - DNA, 3221 bp, Artificial Sequence
  Description of Artificial Sequence: Synthetic DNA sequence of Thermus thermophilus DNA Polymerase E744F
tctagaggaagcatgagcctcaccctggcagacaaggtggtctacgaggaggagatccagaaaagccgcttcatcgccaaggcggcccccgtggcctcggaggaggaggccttggcgtttttggccgagaaccgggagcctgaggccacccacaacggccacgcctacaagatcggcctcctctaccgcttctctgacgacggggagccctcgggcaccgcaggcaggcccatcctccacgccatagaggcccagggcctggaccgggtggcggtcctggtggtgcgctacttcggcggggtgaagctcggggccggggggcttgtgcgggcctacgggggggtggcggcggaggccttaaggcgggcgcccaaggtccccttggtggagcgggtggggctcgccttcctcgtgcccttcgccgaggtgggccgggtctacgccctcctggaggcccgcgcccctgaaggccgaggagacctacaccccggaggcgtgcgcttcgccctcctcctccccaagcccgagcgggaaggtttcctcagggcgctcctggacgccacccggggacaggtggccctggagtagcatggaggcgatgcttccgctctttgaacccaaaggccgggtcctcctggtggacggccaccacctggcctaccgcaccttcttcgccctgaagggcctcaccacgagccggggcgaaccggtgcaggcggtctacggcttcgccaagagcctcctcaaggccctgaaggaggacgggtacaaggccgtcttcgtggtctttgacgccaaggccccctccttccgccacgaggcctacgaggcctacaaggcggggagggccccgacccccgaggacttcccccggcagctcgccctcatcaaggagctggtggacctcctggggtttacccgcctcgaggtccccggctacgaggcggacgacgttctcgccaccctggccaagaaggcggaaaaggaggggtacgaggtgcgcatcctcaccgccgaccgcgacctctaccaactcgtctccgaccgcgtcgccgtcctccaccccgagggccacctcatcaccccggagtggctttgggagaagtacggcctcaggccggagcagtgggtggacttccgcgccctcgtgggggacccctccgacaacctccccggggtcaagggcatcggggagaagaccgccctcaagctcctcaaggagtggggaagcctggaaaacctcctcaagaacctggaccgggtaaagccagaaaacgtccgggagaagatcaaggcccacctggaagacctcaggctctccttggagctctcccgggtgcgcaccgacctccccctggaggtggacctcgcccaggggcgggagcccgaccgggaggggcttagggccttcctggagaggctggagttcggcagcctcctccacgagttcggcctcctggaggcccccgcccccctggaggaggccccctggcccccgccggaaggggccttcgtgggcttcgtcctctcccgccccgagcccatgtgggcggagcttaaagccctggccgcctgcagggacggccgggtgcaccgggcagcagaccccttggcggggctaaaggacctcaaggaggtccggggcctcctcgccaaggacctcgccgtcttggcctcgagggaggggctagacctcgtgcccggggacgaccccatgctcctcgcctacctcctggacccctccaacaccacccccgagggggtggcgcggcgctacgggggggagtggacggaggacgccgcccaccgggccctcctctcggagaggctccatcggaacctccttaagcgcctcgagggggaggagaagctcctttggctctaccacgaggtggaaaagcccctctcccgggtcctggcccacatggaggccaccggggtacggcgggacgtggcctaccttcaggccctttccctggagcttgcggaggagatccgccgcctcgaggaggaggtcttccgcttggcgggccaccccttcaacctcaactcccgggaccagctggaaagggtgctctttgacgagcttaggcttcccgccttggggaagacgcaaaagacaggcaagcgctccaccagcgccgcggtgctggaggccctacgggaggcccaccccatcgtggagaagatcctccagcaccgggagctcaccaagctcaagaacacctacgtggaccccctcccaagcctcgtccacccgaggacgggccgcctccacacccgcttcaaccagacggccacggccacggggaggcttagtagctccgaccccaacctgcagaacatccccgtccgcacccccttgggccagaggatccgccgggccttcgtggccgaggcgggttgggcgttggtggccctggactatagccagatagagctccgcgtcctcgcccacctctccggggacgaaaacctgatcagggtcttccaggaggggaaggacatccacacccagaccgcaagctggatgttcggcgtccccccggaggccgtggaccccctgatgcgccgggcggccaagacggtgaacttcggcgtcctctacggcatgtccgcccataggctctcccaggagcttgccatcccctacgaggaggcggtggcctttatagagcgctacttccaaagcttccccaaggtgcgggcctggatagaaaagaccctggaggaggggaggaagcggggctacgtggaaaccctcttcggaagaaggcgctacgtgcccgacctcaacgcccgggtgaagagcgtcaggtttgccgcggagcgcatggccttcaacatgcccgtccagggcaccgccgccgacctcatgaagctcgccatggtgaagctcttcccccgcctccgggagatgggggcccgcatgctcctccaggtccacgacgagctcctcctggaggccccccaagcgcgggccgaggaggtggcggctttggccaaggaggccatggagaaggcctatcccctcgccgtgcccctggaggtggaggtggggatgggggaggactggctttccgccaagggttaggggggccctgccgtttagaggaagttcaaggggttgtccctcagaaacgcctccaggggaacgccctctgggcctaccaggaggcctttagccccaaaggtgcgggtgaaggcttccaggccctggg

SEQ ID NO: 3613 - DNA, 3221 bp, Artificial Sequence
  Description of Artificial Sequence: Synthetic DNA sequence of Thermus thermophilus DNA Polymerase E744S
tctagaggaagcatgagcctcaccctggcagacaaggtggtctacgaggaggagatccagaaaagccgcttcatcgccaaggcggcccccgtggcctcggaggaggaggccttggcgtttttggccgagaaccgggagcctgaggccacccacaacggccacgcctacaagatcggcctcctctaccgcttctctgacgacggggagccctcgggcaccgcaggcaggcccatcctccacgccatagaggcccagggcctggaccgggtggcggtcctggtggtgcgctacttcggcggggtgaagctcggggccggggggcttgtgcgggcctacgggggggtggcggcggaggccttaaggcgggcgcccaaggtccccttggtggagcgggtggggctcgccttcctcgtgcccttcgccgaggtgggccgggtctacgccctcctggaggcccgcgcccctgaaggccgaggagacctacaccccggaggcgtgcgcttcgccctcctcctccccaagcccgagcgggaaggtttcctcagggcgctcctggacgccacccggggacaggtggccctggagtagcatggaggcgatgcttccgctctttgaacccaaaggccgggtcctcctggtggacggccaccacctggcctaccgcaccttcttcgccctgaagggcctcaccacgagccggggcgaaccggtgcaggcggtctacggcttcgccaagagcctcctcaaggccctgaaggaggacgggtacaaggccgtcttcgtggtctttgacgccaaggccccctccttccgccacgaggcctacgaggcctacaaggcggggagggccccgacccccgaggacttcccccggcagctcgccctcatcaaggagctggtggacctcctggggtttacccgcctcgaggtccccggctacgaggcggacgacgttctcgccaccctggccaagaaggcggaaaaggaggggtacgaggtgcgcatcctcaccgccgaccgcgacctctaccaactcgtctccgaccgcgtcgccgtcctccaccccgagggccacctcatcaccccggagtggctttgggagaagtacggcctcaggccggagcagtgggtggacttccgcgccctcgtgggggacccctccgacaacctccccggggtcaagggcatcggggagaagaccgccctcaagctcctcaaggagtggggaagcctggaaaacctcctcaagaacctggaccgggtaaagccagaaaacgtccgggagaagatcaaggcccacctggaagacctcaggctctccttggagctctcccgggtgcgcaccgacctccccctggaggtggacctcgcccaggggcgggagcccgaccgggaggggcttagggccttcctggagaggctggagttcggcagcctcctccacgagttcggcctcctggaggcccccgcccccctggaggaggccccctggcccccgccggaaggggccttcgtgggcttcgtcctctcccgccccgagcccatgtgggcggagcttaaagccctggccgcctgcagggacggccgggtgcaccgggcagcagaccccttggcggggctaaaggacctcaaggaggtccggggcctcctcgccaaggacctcgccgtcttggcctcgagggaggggctagacctcgtgcccggggacgaccccatgctcctcgcctacctcctggacccctccaacaccacccccgagggggtggcgcggcgctacgggggggagtggacggaggacgccgcccaccgggccctcctctcggagaggctccatcggaacctccttaagcgcctcgagggggaggagaagctcctttggctctaccacgaggtggaaaagcccctctcccgggtcctggcccacatggaggccaccggggtacggcgggacgtggcctaccttcaggccctttccctggagcttgcggaggagatccgccgcctcgaggaggaggtcttccgcttggcgggccaccccttcaacctcaactcccgggaccagctggaaagggtgctctttgacgagcttaggcttcccgccttggggaagacgcaaaagacaggcaagcgctccaccagcgccgcggtgctggaggccctacgggaggcccaccccatcgtggagaagatcctccagcaccgggagctcaccaagctcaagaacacctacgtggaccccctcccaagcctcgtccacccgaggacgggccgcctccacacccgcttcaaccagacggccacggccacggggaggcttagtagctccgaccccaacctgcagaacatccccgtccgcacccccttgggccagaggatccgccgggccttcgtggccgaggcgggttgggcgttggtggccctggactatagccagatagagctccgcgtcctcgcccacctctccggggacgaaaacctgatcagggtcttccaggaggggaaggacatccacacccagaccgcaagctggatgttcggcgtccccccggaggccgtggaccccctgatgcgccgggcggccaagacggtgaacttcggcgtcctctacggcatgtccgcccataggctctcccaggagcttgccatcccctacgaggaggcggtggcctttatagagcgctacttccaaagcttccccaaggtgcgggcctggatagaaaagaccctggaggaggggaggaagcggggctacgtggaaaccctcttcggaagaaggcgctacgtgcccgacctcaacgcccgggtgaagagcgtcaggtctgccgcggagcgcatggccttcaacatgcccgtccagggcaccgccgccgacctcatgaagctcgccatggtgaagctcttcccccgcctccgggagatgggggcccgcatgctcctccaggtccacgacgagctcctcctggaggccccccaagcgcgggccgaggaggtggcggctttggccaaggaggccatggagaaggcctatcccctcgccgtgcccctggaggtggaggtggggatgggggaggactggctttccgccaagggttaggggggccctgccgtttagaggaagttcaaggggttgtccctcagaaacgcctccaggggaacgccctctgggcctaccaggaggcctttagccccaaaggtgcgggtgaaggcttccaggccctggg

SEQ ID NO: 3614 - DNA, 3221 bp, Artificial Sequence
  Description of Artificial Sequence: Synthetic DNA sequence of Thermus thermophilus DNA Polymerase E744Y
tctagaggaagcatgagcctcaccctggcagacaaggtggtctacgaggaggagatccagaaaagccgcttcatcgccaaggcggcccccgtggcctcggaggaggaggccttggcgtttttggccgagaaccgggagcctgaggccacccacaacggccacgcctacaagatcggcctcctctaccgcttctctgacgacggggagccctcgggcaccgcaggcaggcccatcctccacgccatagaggcccagggcctggaccgggtggcggtcctggtggtgcgctacttcggcggggtgaagctcggggccggggggcttgtgcgggcctacgggggggtggcggcggaggccttaaggcgggcgcccaaggtccccttggtggagcgggtggggctcgccttcctcgtgcccttcgccgaggtgggccgggtctacgccctcctggaggcccgcgcccctgaaggccgaggagacctacaccccggaggcgtgcgcttcgccctcctcctccccaagcccgagcgggaaggtttcctcagggcgctcctggacgccacccggggacaggtggccctggagtagcatggaggcgatgcttccgctctttgaacccaaaggccgggtcctcctggtggacggccaccacctggcctaccgcaccttcttcgccctgaagggcctcaccacgagccggggcgaaccggtgcaggcggtctacggcttcgccaagagcctcctcaaggccctgaaggaggacgggtacaaggccgtcttcgtggtctttgacgccaaggccccctccttccgccacgaggcctacgaggcctacaaggcggggagggccccgacccccgaggacttcccccggcagctcgccctcatcaaggagctggtggacctcctggggtttacccgcctcgaggtccccggctacgaggcggacgacgttctcgccaccctggccaagaaggcggaaaaggaggggtacgaggtgcgcatcctcaccgccgaccgcgacctctaccaactcgtctccgaccgcgtcgccgtcctccaccccgagggccacctcatcaccccggagtggctttgggagaagtacggcctcaggccggagcagtgggtggacttccgcgccctcgtgggggacccctccgacaacctccccggggtcaagggcatcggggagaagaccgccctcaagctcctcaaggagtggggaagcctggaaaacctcctcaagaacctggaccgggtaaagccagaaaacgtccgggagaagatcaaggcccacctggaagacctcaggctctccttggagctctcccgggtgcgcaccgacctccccctggaggtggacctcgcccaggggcgggagcccgaccgggaggggcttagggccttcctggagaggctggagttcggcagcctcctccacgagttcggcctcctggaggcccccgcccccctggaggaggccccctggcccccgccggaaggggccttcgtgggcttcgtcctctcccgccccgagcccatgtgggcggagcttaaagccctggccgcctgcagggacggccgggtgcaccgggcagcagaccccttggcggggctaaaggacctcaaggaggtccggggcctcctcgccaaggacctcgccgtcttggcctcgagggaggggctagacctcgtgcccggggacgaccccatgctcctcgcctacctcctggacccctccaacaccacccccgagggggtggcgcggcgctacgggggggagtggacggaggacgccgcccaccgggccctcctctcggagaggctccatcggaacctccttaagcgcctcgagggggaggagaagctcctttggctctaccacgaggtggaaaagcccctctcccgggtcctggcccacatggaggccaccggggtacggcgggacgtggcctaccttcaggccctttccctggagcttgcggaggagatccgccgcctcgaggaggaggtcttccgcttggcgggccaccccttcaacctcaactcccgggaccagctggaaagggtgctctttgacgagcttaggcttcccgccttggggaagacgcaaaagacaggcaagcgctccaccagcgccgcggtgctggaggccctacgggaggcccaccccatcgtggagaagatcctccagcaccgggagctcaccaagctcaagaacacctacgtggaccccctcccaagcctcgtccacccgaggacgggccgcctccacacccgcttcaaccagacggccacggccacggggaggcttagtagctccgaccccaacctgcagaacatccccgtccgcacccccttgggccagaggatccgccgggccttcgtggccgaggcgggttgggcgttggtggccctggactatagccagatagagctccgcgtcctcgcccacctctccggggacgaaaacctgatcagggtcttccaggaggggaaggacatccacacccagaccgcaagctggatgttcggcgtccccccggaggccgtggaccccctgatgcgccgggcggccaagacggtgaacttcggcgtcctctacggcatgtccgcccataggctctcccaggagcttgccatcccctacgaggaggcggtggcctttatagagcgctacttccaaagcttccccaaggtgcgggcctggatagaaaagaccctggaggaggggaggaagcggggctacgtggaaaccctcttcggaagaaggcgctacgtgcccgacctcaacgcccgggtgaagagcgtcaggtatgccgcggagcgcatggccttcaacatgcccgtccagggcaccgccgccgacctcatgaagctcgccatggtgaagctcttcccccgcctccgggagatgggggcccgcatgctcctccaggtccacgacgagctcctcctggaggccccccaagcgcgggccgaggaggtggcggctttggccaaggaggccatggagaaggcctatcccctcgccgtgcccctggaggtggaggtggggatgggggaggactggctttccgccaagggttaggggggccctgccgtttagaggaagttcaaggggttgtccctcagaaacgcctccaggggaacgccctctgggcctaccaggaggcctttagccccaaaggtgcgggtgaaggcttccaggccctggg

SEQ ID NO: 3615 - DNA, 3221 bp, Artificial Sequence
  Description of Artificial Sequence: Synthetic DNA sequence of Thermus thermophilus DNA Polymerase E744W
tctagaggaagcatgagcctcaccctggcagacaaggtggtctacgaggaggagatccagaaaagccgcttcatcgccaaggcggcccccgtggcctcggaggaggaggccttggcgtttttggccgagaaccgggagcctgaggccacccacaacggccacgcctacaagatcggcctcctctaccgcttctctgacgacggggagccctcgggcaccgcaggcaggcccatcctccacgccatagaggcccagggcctggaccgggtggcggtcctggtggtgcgctacttcggcggggtgaagctcggggccggggggcttgtgcgggcctacgggggggtggcggcggaggccttaaggcgggcgcccaaggtccccttggtggagcgggtggggctcgccttcctcgtgcccttcgccgaggtgggccgggtctacgccctcctggaggcccgcgcccctgaaggccgaggagacctacaccccggaggcgtgcgcttcgccctcctcctccccaagcccgagcgggaaggtttcctcagggcgctcctggacgccacccggggacaggtggccctggagtagcatggaggcgatgcttccgctctttgaacccaaaggccgggtcctcctggtggacggccaccacctggcctaccgcaccttcttcgccctgaagggcctcaccacgagccggggcgaaccggtgcaggcggtctacggcttcgccaagagcctcctcaaggccctgaaggaggacgggtacaaggccgtcttcgtggtctttgacgccaaggccccctccttccgccacgaggcctacgaggcctacaaggcggggagggccccgacccccgaggacttcccccggcagctcgccctcatcaaggagctggtggacctcctggggtttacccgcctcgaggtccccggctacgaggcggacgacgttctcgccaccctggccaagaaggcggaaaaggaggggtacgaggtgcgcatcctcaccgccgaccgcgacctctaccaactcgtctccgaccgcgtcgccgtcctccaccccgagggccacctcatcaccccggagtggctttgggagaagtacggcctcaggccggagcagtgggtggacttccgcgccctcgtgggggacccctccgacaacctccccggggtcaagggcatcggggagaagaccgccctcaagctcctcaaggagtggggaagcctggaaaacctcctcaagaacctggaccgggtaaagccagaaaacgtccgggagaagatcaaggcccacctggaagacctcaggctctccttggagctctcccgggtgcgcaccgacctccccctggaggtggacctcgcccaggggcgggagcccgaccgggaggggcttagggccttcctggagaggctggagttcggcagcctcctccacgagttcggcctcctggaggcccccgcccccctggaggaggccccctggcccccgccggaaggggccttcgtgggcttcgtcctctcccgccccgagcccatgtgggcggagcttaaagccctggccgcctgcagggacggccgggtgcaccgggcagcagaccccttggcggggctaaaggacctcaaggaggtccggggcctcctcgccaaggacctcgccgtcttggcctcgagggaggggctagacctcgtgcccggggacgaccccatgctcctcgcctacctcctggacccctccaacaccacccccgagggggtggcgcggcgctacgggggggagtggacggaggacgccgcccaccgggccctcctctcggagaggctccatcggaacctccttaagcgcctcgagggggaggagaagctcctttggctctaccacgaggtggaaaagcccctctcccgggtcctggcccacatggaggccaccggggtacggcgggacgtggcctaccttcaggccctttccctggagcttgcggaggagatccgccgcctcgaggaggaggtcttccgcttggcgggccaccccttcaacctcaactcccgggaccagctggaaagggtgctctttgacgagcttaggcttcccgccttggggaagacgcaaaagacaggcaagcgctccaccagcgccgcggtgctggaggccctacgggaggcccaccccatcgtggagaagatcctccagcaccgggagctcaccaagctcaagaacacctacgtggaccccctcccaagcctcgtccacccgaggacgggccgcctccacacccgcttcaaccagacggccacggccacggggaggcttagtagctccgaccccaacctgcagaacatccccgtccgcacccccttgggccagaggatccgccgggccttcgtggccgaggcgggttgggcgttggtggccctggactatagccagatagagctccgcgtcctcgcccacctctccggggacgaaaacctgatcagggtcttccaggaggggaaggacatccacacccagaccgcaagctggatgttcggcgtccccccggaggccgtggaccccctgatgcgccgggcggccaagacggtgaacttcggcgtcctctacggcatgtccgcccataggctctcccaggagcttgccatcccctacgaggaggcggtggcctttatagagcgctacttccaaagcttccccaaggtgcgggcctggatagaaaagaccctggaggaggggaggaagcggggctacgtggaaaccctcttcggaagaaggcgctacgtgcccgacctcaacgcccgggtgaagagcgtcaggtgggccgcggagcgcatggccttcaacatgcccgtccagggcaccgccgccgacctcatgaagctcgccatggtgaagctcttcccccgcctccgggagatgggggcccgcatgctcctccaggtccacgacgagctcctcctggaggccccccaagcgcgggccgaggaggtggcggctttggccaaggaggccatggagaaggcctatcccctcgccgtgcccctggaggtggaggtggggatgggggaggactggctttccgccaagggttaggggggccctgccgtttagaggaagttcaaggggttgtccctcagaaacgcctccaggggaacgccctctgggcctaccaggaggcctttagccccaaaggtgcgggtgaaggcttccaggccctggg

SEQ ID NO: 3616 - DNA, 3221 bp, Artificial Sequence
  Description of Artificial Sequence: Synthetic DNA sequence of Thermus thermophilus DNA Polymerase E744P
tctagaggaagcatgagcctcaccctggcagacaaggtggtctacgaggaggagatccagaaaagccgcttcatcgccaaggcggcccccgtggcctcggaggaggaggccttggcgtttttggccgagaaccgggagcctgaggccacccacaacggccacgcctacaagatcggcctcctctaccgcttctctgacgacggggagccctcgggcaccgcaggcaggcccatcctccacgccatagaggcccagggcctggaccgggtggcggtcctggtggtgcgctacttcggcggggtgaagctcggggccggggggcttgtgcgggcctacgggggggtggcggcggaggccttaaggcgggcgcccaaggtccccttggtggagcgggtggggctcgccttcctcgtgcccttcgccgaggtgggccgggtctacgccctcctggaggcccgcgcccctgaaggccgaggagacctacaccccggaggcgtgcgcttcgccctcctcctccccaagcccgagcgggaaggtttcctcagggcgctcctggacgccacccggggacaggtggccctggagtagcatggaggcgatgcttccgctctttgaacccaaaggccgggtcctcctggtggacggccaccacctggcctaccgcaccttcttcgccctgaagggcctcaccacgagccggggcgaaccggtgcaggcggtctacggcttcgccaagagcctcctcaaggccctgaaggaggacgggtacaaggccgtcttcgtggtctttgacgccaaggccccctccttccgccacgaggcctacgaggcctacaaggcggggagggccccgacccccgaggacttcccccggcagctcgccctcatcaaggagctggtggacctcctggggtttacccgcctcgaggtccccggctacgaggcggacgacgttctcgccaccctggccaagaaggcggaaaaggaggggtacgaggtgcgcatcctcaccgccgaccgcgacctctaccaactcgtctccgaccgcgtcgccgtcctccaccccgagggccacctcatcaccccggagtggctttgggagaagtacggcctcaggccggagcagtgggtggacttccgcgccctcgtgggggacccctccgacaacctccccggggtcaagggcatcggggagaagaccgccctcaagctcctcaaggagtggggaagcctggaaaacctcctcaagaacctggaccgggtaaagccagaaaacgtccgggagaagatcaaggcccacctggaagacctcaggctctccttggagctctcccgggtgcgcaccgacctccccctggaggtggacctcgcccaggggcgggagcccgaccgggaggggcttagggccttcctggagaggctggagttcggcagcctcctccacgagttcggcctcctggaggcccccgcccccctggaggaggccccctggcccccgccggaaggggccttcgtgggcttcgtcctctcccgccccgagcccatgtgggcggagcttaaagccctggccgcctgcagggacggccgggtgcaccgggcagcagaccccttggcggggctaaaggacctcaaggaggtccggggcctcctcgccaaggacctcgccgtcttggcctcgagggaggggctagacctcgtgcccggggacgaccccatgctcctcgcctacctcctggacccctccaacaccacccccgagggggtggcgcggcgctacgggggggagtggacggaggacgccgcccaccgggccctcctctcggagaggctccatcggaacctccttaagcgcctcgagggggaggagaagctcctttggctctaccacgaggtggaaaagcccctctcccgggtcctggcccacatggaggccaccggggtacggcgggacgtggcctaccttcaggccctttccctggagcttgcggaggagatccgccgcctcgaggaggaggtcttccgcttggcgggccaccccttcaacctcaactcccgggaccagctggaaagggtgctctttgacgagcttaggcttcccgccttggggaagacgcaaaagacaggcaagcgctccaccagcgccgcggtgctggaggccctacgggaggcccaccccatcgtggagaagatcctccagcaccgggagctcaccaagctcaagaacacctacgtggaccccctcccaagcctcgtccacccgaggacgggccgcctccacacccgcttcaaccagacggccacggccacggggaggcttagtagctccgaccccaacctgcagaacatccccgtccgcacccccttgggccagaggatccgccgggccttcgtggccgaggcgggttgggcgttggtggccctggactatagccagatagagctccgcgtcctcgcccacctctccggggacgaaaacctgatcagggtcttccaggaggggaaggacatccacacccagaccgcaagctggatgttcggcgtccccccggaggccgtggaccccctgatgcgccgggcggccaagacggtgaacttcggcgtcctctacggcatgtccgcccataggctctcccaggagcttgccatcccctacgaggaggcggtggcctttatagagcgctacttccaaagcttccccaaggtgcgggcctggatagaaaagaccctggaggaggggaggaagcggggctacgtggaaaccctcttcggaagaaggcgctacgtgcccgacctcaacgcccgggtgaagagcgtcaggcctgccgcggagcgcatggccttcaacatgcccgtccagggcaccgccgccgacctcatgaagctcgccatggtgaagctcttcccccgcctccgggagatgggggcccgcatgctcctccaggtccacgacgagctcctcctggaggccccccaagcgcgggccgaggaggtggcggctttggccaaggaggccatggagaaggcctatcccctcgccgtgcccctggaggtggaggtggggatgggggaggactggctttccgccaagggttaggggggccctgccgtttagaggaagttcaaggggttgtccctcagaaacgcctccaggggaacgccctctgggcctaccaggaggcctttagccccaaaggtgcgggtgaaggcttccaggccctggg

SEQ ID NO: 3617 - DNA, 3221 bp, Artificial Sequence
  Description of Artificial Sequence: Synthetic DNA sequence of Thermus thermophilus DNA Polymerase E744M
tctagaggaagcatgagcctcaccctggcagacaaggtggtctacgaggaggagatccagaaaagccgcttcatcgccaaggcggcccccgtggcctcggaggaggaggccttggcgtttttggccgagaaccgggagcctgaggccacccacaacggccacgcctacaagatcggcctcctctaccgcttctctgacgacggggagccctcgggcaccgcaggcaggcccatcctccacgccatagaggcccagggcctggaccgggtggcggtcctggtggtgcgctacttcggcggggtgaagctcggggccggggggcttgtgcgggcctacgggggggtggcggcggaggccttaaggcgggcgcccaaggtccccttggtggagcgggtggggctcgccttcctcgtgcccttcgccgaggtgggccgggtctacgccctcctggaggcccgcgcccctgaaggccgaggagacctacaccccggaggcgtgcgcttcgccctcctcctccccaagcccgagcgggaaggtttcctcagggcgctcctggacgccacccggggacaggtggccctggagtagcatggaggcgatgcttccgctctttgaacccaaaggccgggtcctcctggtggacggccaccacctggcctaccgcaccttcttcgccctgaagggcctcaccacgagccggggcgaaccggtgcaggcggtctacggcttcgccaagagcctcctcaaggccctgaaggaggacgggtacaaggccgtcttcgtggtctttgacgccaaggccccctccttccgccacgaggcctacgaggcctacaaggcggggagggccccgacccccgaggacttcccccggcagctcgccctcatcaaggagctggtggacctcctggggtttacccgcctcgaggtccccggctacgaggcggacgacgttctcgccaccctggccaagaaggcggaaaaggaggggtacgaggtgcgcatcctcaccgccgaccgcgacctctaccaactcgtctccgaccgcgtcgccgtcctccaccccgagggccacctcatcaccccggagtggctttgggagaagtacggcctcaggccggagcagtgggtggacttccgcgccctcgtgggggacccctccgacaacctccccggggtcaagggcatcggggagaagaccgccctcaagctcctcaaggagtggggaagcctggaaaacctcctcaagaacctggaccgggtaaagccagaaaacgtccgggagaagatcaaggcccacctggaagacctcaggctctccttggagctctcccgggtgcgcaccgacctccccctggaggtggacctcgcccaggggcgggagcccgaccgggaggggcttagggccttcctggagaggctggagttcggcagcctcctccacgagttcggcctcctggaggcccccgcccccctggaggaggccccctggcccccgccggaaggggccttcgtgggcttcgtcctctcccgccccgagcccatgtgggcggagcttaaagccctggccgcctgcagggacggccgggtgcaccgggcagcagaccccttggcggggctaaaggacctcaaggaggtccggggcctcctcgccaaggacctcgccgtcttggcctcgagggaggggctagacctcgtgcccggggacgaccccatgctcctcgcctacctcctggacccctccaacaccacccccgagggggtggcgcggcgctacgggggggagtggacggaggacgccgcccaccgggccctcctctcggagaggctccatcggaacctccttaagcgcctcgagggggaggagaagctcctttggctctaccacgaggtggaaaagcccctctcccgggtcctggcccacatggaggccaccggggtacggcgggacgtggcctaccttcaggccctttccctggagcttgcggaggagatccgccgcctcgaggaggaggtcttccgcttggcgggccaccccttcaacctcaactcccgggaccagctggaaagggtgctctttgacgagcttaggcttcccgccttggggaagacgcaaaagacaggcaagcgctccaccagcgccgcggtgctggaggccctacgggaggcccaccccatcgtggagaagatcctccagcaccgggagctcaccaagctcaagaacacctacgtggaccccctcccaagcctcgtccacccgaggacgggccgcctccacacccgcttcaaccagacggccacggccacggggaggcttagtagctccgaccccaacctgcagaacatccccgtccgcacccccttgggccagaggatccgccgggccttcgtggccgaggcgggttgggcgttggtggccctggactatagccagatagagctccgcgtcctcgcccacctctccggggacgaaaacctgatcagggtcttccaggaggggaaggacatccacacccagaccgcaagctggatgttcggcgtccccccggaggccgtggaccccctgatgcgccgggcggccaagacggtgaacttcggcgtcctctacggcatgtccgcccataggctctcccaggagcttgccatcccctacgaggaggcggtggcctttatagagcgctacttccaaagcttccccaaggtgcgggcctggatagaaaagaccctggaggaggggaggaagcggggctacgtggaaaccctcttcggaagaaggcgctacgtgcccgacctcaacgcccgggtgaagagcgtcaggatggccgcggagcgcatggccttcaacatgcccgtccagggcaccgccgccgacctcatgaagctcgccatggtgaagctcttcccccgcctccgggagatgggggcccgcatgctcctccaggtccacgacgagctcctcctggaggccccccaagcgcgggccgaggaggtggcggctttggccaaggaggccatggagaaggcctatcccctcgccgtgcccctggaggtggaggtggggatgggggaggactggctttccgccaagggttaggggggccctgccgtttagaggaagttcaaggggttgtccctcagaaacgcctccaggggaacgccctctgggcctaccaggaggcctttagccccaaaggtgcgggtgaaggcttccaggccctggg

SEQ ID NO: 3618 - DNA, 3221 bp, Artificial Sequence
  Description of Artificial Sequence: Synthetic DNA sequence of Thermus thermophilus DNA Polymerase E744T
tctagaggaagcatgagcctcaccctggcagacaaggtggtctacgaggaggagatccagaaaagccgcttcatcgccaaggcggcccccgtggcctcggaggaggaggccttggcgtttttggccgagaaccgggagcctgaggccacccacaacggccacgcctacaagatcggcctcctctaccgcttctctgacgacggggagccctcgggcaccgcaggcaggcccatcctccacgccatagaggcccagggcctggaccgggtggcggtcctggtggtgcgctacttcggcggggtgaagctcggggccggggggcttgtgcgggcctacgggggggtggcggcggaggccttaaggcgggcgcccaaggtccccttggtggagcgggtggggctcgccttcctcgtgcccttcgccgaggtgggccgggtctacgccctcctggaggcccgcgcccctgaaggccgaggagacctacaccccggaggcgtgcgcttcgccctcctcctccccaagcccgagcgggaaggtttcctcagggcgctcctggacgccacccggggacaggtggccctggagtagcatggaggcgatgcttccgctctttgaacccaaaggccgggtcctcctggtggacggccaccacctggcctaccgcaccttcttcgccctgaagggcctcaccacgagccggggcgaaccggtgcaggcggtctacggcttcgccaagagcctcctcaaggccctgaaggaggacgggtacaaggccgtcttcgtggtctttgacgccaaggccccctccttccgccacgaggcctacgaggcctacaaggcggggagggccccgacccccgaggacttcccccggcagctcgccctcatcaaggagctggtggacctcctggggtttacccgcctcgaggtccccggctacgaggcggacgacgttctcgccaccctggccaagaaggcggaaaaggaggggtacgaggtgcgcatcctcaccgccgaccgcgacctctaccaactcgtctccgaccgcgtcgccgtcctccaccccgagggccacctcatcaccccggagtggctttgggagaagtacggcctcaggccggagcagtgggtggacttccgcgccctcgtgggggacccctccgacaacctccccggggtcaagggcatcggggagaagaccgccctcaagctcctcaaggagtggggaagcctggaaaacctcctcaagaacctggaccgggtaaagccagaaaacgtccgggagaagatcaaggcccacctggaagacctcaggctctccttggagctctcccgggtgcgcaccgacctccccctggaggtggacctcgcccaggggcgggagcccgaccgggaggggcttagggccttcctggagaggctggagttcggcagcctcctccacgagttcggcctcctggaggcccccgcccccctggaggaggccccctggcccccgccggaaggggccttcgtgggcttcgtcctctcccgccccgagcccatgtgggcggagcttaaagccctggccgcctgcagggacggccgggtgcaccgggcagcagaccccttggcggggctaaaggacctcaaggaggtccggggcctcctcgccaaggacctcgccgtcttggcctcgagggaggggctagacctcgtgcccggggacgaccccatgctcctcgcctacctcctggacccctccaacaccacccccgagggggtggcgcggcgctacgggggggagtggacggaggacgccgcccaccgggccctcctctcggagaggctccatcggaacctccttaagcgcctcgagggggaggagaagctcctttggctctaccacgaggtggaaaagcccctctcccgggtcctggcccacatggaggccaccggggtacggcgggacgtggcctaccttcaggccctttccctggagcttgcggaggagatccgccgcctcgaggaggaggtcttccgcttggcgggccaccccttcaacctcaactcccgggaccagctggaaagggtgctctttgacgagcttaggcttcccgccttggggaagacgcaaaagacaggcaagcgctccaccagcgccgcggtgctggaggccctacgggaggcccaccccatcgtggagaagatcctccagcaccgggagctcaccaagctcaagaacacctacgtggaccccctcccaagcctcgtccacccgaggacgggccgcctccacacccgcttcaaccagacggccacggccacggggaggcttagtagctccgaccccaacctgcagaacatccccgtccgcacccccttgggccagaggatccgccgggccttcgtggccgaggcgggttgggcgttggtggccctggactatagccagatagagctccgcgtcctcgcccacctctccggggacgaaaacctgatcagggtcttccaggaggggaaggacatccacacccagaccgcaagctggatgttcggcgtccccccggaggccgtggaccccctgatgcgccgggcggccaagacggtgaacttcggcgtcctctacggcatgtccgcccataggctctcccaggagcttgccatcccctacgaggaggcggtggcctttatagagcgctacttccaaagcttccccaaggtgcgggcctggatagaaaagaccctggaggaggggaggaagcggggctacgtggaaaccctcttcggaagaaggcgctacgtgcccgacctcaacgcccgggtgaagagcgtcaggactgccgcggagcgcatggccttcaacatgcccgtccagggcaccgccgccgacctcatgaagctcgccatggtgaagctcttcccccgcctccgggagatgggggcccgcatgctcctccaggtccacgacgagctcctcctggaggccccccaagcgcgggccgaggaggtggcggctttggccaaggaggccatggagaaggcctatcccctcgccgtgcccctggaggtggaggtggggatgggggaggactggctttccgccaagggttaggggggccctgccgtttagaggaagttcaaggggttgtccctcagaaacgcctccaggggaacgccctctgggcctaccaggaggcctttagccccaaaggtgcgggtgaaggcttccaggccctggg

SEQ ID NO: 3619 - DNA, 3221 bp, Artificial Sequence
  Description of Artificial Sequence: Synthetic DNA sequence of Thermus thermophilus DNA Polymerase E744N
tctagaggaagcatgagcctcaccctggcagacaaggtggtctacgaggaggagatccagaaaagccgcttcatcgccaaggcggcccccgtggcctcggaggaggaggccttggcgtttttggccgagaaccgggagcctgaggccacccacaacggccacgcctacaagatcggcctcctctaccgcttctctgacgacggggagccctcgggcaccgcaggcaggcccatcctccacgccatagaggcccagggcctggaccgggtggcggtcctggtggtgcgctacttcggcggggtgaagctcggggccggggggcttgtgcgggcctacgggggggtggcggcggaggccttaaggcgggcgcccaaggtccccttggtggagcgggtggggctcgccttcctcgtgcccttcgccgaggtgggccgggtctacgccctcctggaggcccgcgcccctgaaggccgaggagacctacaccccggaggcgtgcgcttcgccctcctcctccccaagcccgagcgggaaggtttcctcagggcgctcctggacgccacccggggacaggtggccctggagtagcatggaggcgatgcttccgctctttgaacccaaaggccgggtcctcctggtggacggccaccacctggcctaccgcaccttcttcgccctgaagggcctcaccacgagccggggcgaaccggtgcaggcggtctacggcttcgccaagagcctcctcaaggccctgaaggaggacgggtacaaggccgtcttcgtggtctttgacgccaaggccccctccttccgccacgaggcctacgaggcctacaaggcggggagggccccgacccccgaggacttcccccggcagctcgccctcatcaaggagctggtggacctcctggggtttacccgcctcgaggtccccggctacgaggcggacgacgttctcgccaccctggccaagaaggcggaaaaggaggggtacgaggtgcgcatcctcaccgccgaccgcgacctctaccaactcgtctccgaccgcgtcgccgtcctccaccccgagggccacctcatcaccccggagtggctttgggagaagtacggcctcaggccggagcagtgggtggacttccgcgccctcgtgggggacccctccgacaacctccccggggtcaagggcatcggggagaagaccgccctcaagctcctcaaggagtggggaagcctggaaaacctcctcaagaacctggaccgggtaaagccagaaaacgtccgggagaagatcaaggcccacctggaagacctcaggctctccttggagctctcccgggtgcgcaccgacctccccctggaggtggacctcgcccaggggcgggagcccgaccgggaggggcttagggccttcctggagaggctggagttcggcagcctcctccacgagttcggcctcctggaggcccccgcccccctggaggaggccccctggcccccgccggaaggggccttcgtgggcttcgtcctctcccgccccgagcccatgtgggcggagcttaaagccctggccgcctgcagggacggccgggtgcaccgggcagcagaccccttggcggggctaaaggacctcaaggaggtccggggcctcctcgccaaggacctcgccgtcttggcctcgagggaggggctagacctcgtgcccggggacgaccccatgctcctcgcctacctcctggacccctccaacaccacccccgagggggtggcgcggcgctacgggggggagtggacggaggacgccgcccaccgggccctcctctcggagaggctccatcggaacctccttaagcgcctcgagggggaggagaagctcctttggctctaccacgaggtggaaaagcccctctcccgggtcctggcccacatggaggccaccggggtacggcgggacgtggcctaccttcaggccctttccctggagcttgcggaggagatccgccgcctcgaggaggaggtcttccgcttggcgggccaccccttcaacctcaactcccgggaccagctggaaagggtgctctttgacgagcttaggcttcccgccttggggaagacgcaaaagacaggcaagcgctccaccagcgccgcggtgctggaggccctacgggaggcccaccccatcgtggagaagatcctccagcaccgggagctcaccaagctcaagaacacctacgtggaccccctcccaagcctcgtccacccgaggacgggccgcctccacacccgcttcaaccagacggccacggccacggggaggcttagtagctccgaccccaacctgcagaacatccccgtccgcacccccttgggccagaggatccgccgggccttcgtggccgaggcgggttgggcgttggtggccctggactatagccagatagagctccgcgtcctcgcccacctctccggggacgaaaacctgatcagggtcttccaggaggggaaggacatccacacccagaccgcaagctggatgttcggcgtccccccggaggccgtggaccccctgatgcgccgggcggccaagacggtgaacttcggcgtcctctacggcatgtccgcccataggctctcccaggagcttgccatcccctacgaggaggcggtggcctttatagagcgctacttccaaagcttccccaaggtgcgggcctggatagaaaagaccctggaggaggggaggaagcggggctacgtggaaaccctcttcggaagaaggcgctacgtgcccgacctcaacgcccgggtgaagagcgtcaggaatgccgcggagcgcatggccttcaacatgcccgtccagggcaccgccgccgacctcatgaagctcgccatggtgaagctcttcccccgcctccgggagatgggggcccgcatgctcctccaggtccacgacgagctcctcctggaggccccccaagcgcgggccgaggaggtggcggctttggccaaggaggccatggagaaggcctatcccctcgccgtgcccctggaggtggaggtggggatgggggaggactggctttccgccaagggttaggggggccctgccgtttagaggaagttcaaggggttgtccctcagaaacgcctccaggggaacgccctctgggcctaccaggaggcctttagccccaaaggtgcgggtgaaggcttccaggccctggg

SEQ ID NO: 3620 - DNA, 3221 bp, Artificial Sequence
  Description of Artificial Sequence: Synthetic DNA sequence of Thermus thermophilus DNA Polymerase E744V
tctagaggaagcatgagcctcaccctggcagacaaggtggtctacgaggaggagatccagaaaagccgcttcatcgccaaggcggcccccgtggcctcggaggaggaggccttggcgtttttggccgagaaccgggagcctgaggccacccacaacggccacgcctacaagatcggcctcctctaccgcttctctgacgacggggagccctcgggcaccgcaggcaggcccatcctccacgccatagaggcccagggcctggaccgggtggcggtcctggtggtgcgctacttcggcggggtgaagctcggggccggggggcttgtgcgggcctacgggggggtggcggcggaggccttaaggcgggcgcccaaggtccccttggtggagcgggtggggctcgccttcctcgtgcccttcgccgaggtgggccgggtctacgccctcctggaggcccgcgcccctgaaggccgaggagacctacaccccggaggcgtgcgcttcgccctcctcctccccaagcccgagcgggaaggtttcctcagggcgctcctggacgccacccggggacaggtggccctggagtagcatggaggcgatgcttccgctctttgaacccaaaggccgggtcctcctggtggacggccaccacctggcctaccgcaccttcttcgccctgaagggcctcaccacgagccggggcgaaccggtgcaggcggtctacggcttcgccaagagcctcctcaaggccctgaaggaggacgggtacaaggccgtcttcgtggtctttgacgccaaggccccctccttccgccacgaggcctacgaggcctacaaggcggggagggccccgacccccgaggacttcccccggcagctcgccctcatcaaggagctggtggacctcctggggtttacccgcctcgaggtccccggctacgaggcggacgacgttctcgccaccctggccaagaaggcggaaaaggaggggtacgaggtgcgcatcctcaccgccgaccgcgacctctaccaactcgtctccgaccgcgtcgccgtcctccaccccgagggccacctcatcaccccggagtggctttgggagaagtacggcctcaggccggagcagtgggtggacttccgcgccctcgtgggggacccctccgacaacctccccggggtcaagggcatcggggagaagaccgccctcaagctcctcaaggagtggggaagcctggaaaacctcctcaagaacctggaccgggtaaagccagaaaacgtccgggagaagatcaaggcccacctggaagacctcaggctctccttggagctctcccgggtgcgcaccgacctccccctggaggtggacctcgcccaggggcgggagcccgaccgggaggggcttagggccttcctggagaggctggagttcggcagcctcctccacgagttcggcctcctggaggcccccgcccccctggaggaggccccctggcccccgccggaaggggccttcgtgggcttcgtcctctcccgccccgagcccatgtgggcggagcttaaagccctggccgcctgcagggacggccgggtgcaccgggcagcagaccccttggcggggctaaaggacctcaaggaggtccggggcctcctcgccaaggacctcgccgtcttggcctcgagggaggggctagacctcgtgcccggggacgaccccatgctcctcgcctacctcctggacccctccaacaccacccccgagggggtggcgcggcgctacgggggggagtggacggaggacgccgcccaccgggccctcctctcggagaggctccatcggaacctccttaagcgcctcgagggggaggagaagctcctttggctctaccacgaggtggaaaagcccctctcccgggtcctggcccacatggaggccaccggggtacggcgggacgtggcctaccttcaggccctttccctggagcttgcggaggagatccgccgcctcgaggaggaggtcttccgcttggcgggccaccccttcaacctcaactcccgggaccagctggaaagggtgctctttgacgagcttaggcttcccgccttggggaagacgcaaaagacaggcaagcgctccaccagcgccgcggtgctggaggccctacgggaggcccaccccatcgtggagaagatcctccagcaccgggagctcaccaagctcaagaacacctacgtggaccccctcccaagcctcgtccacccgaggacgggccgcctccacacccgcttcaaccagacggccacggccacggggaggcttagtagctccgaccccaacctgcagaacatccccgtccgcacccccttgggccagaggatccgccgggccttcgtggccgaggcgggttgggcgttggtggccctggactatagccagatagagctccgcgtcctcgcccacctctccggggacgaaaacctgatcagggtcttccaggaggggaaggacatccacacccagaccgcaagctggatgttcggcgtccccccggaggccgtggaccccctgatgcgccgggcggccaagacggtgaacttcggcgtcctctacggcatgtccgcccataggctctcccaggagcttgccatcccctacgaggaggcggtggcctttatagagcgctacttccaaagcttccccaaggtgcgggcctggatagaaaagaccctggaggaggggaggaagcggggctacgtggaaaccctcttcggaagaaggcgctacgtgcccgacctcaacgcccgggtgaagagcgtcagggtcgccgcggagcgcatggccttcaacatgcccgtccagggcaccgccgccgacctcatgaagctcgccatggtgaagctcttcccccgcctccgggagatgggggcccgcatgctcctccaggtccacgacgagctcctcctggaggccccccaagcgcgggccgaggaggtggcggctttggccaaggaggccatggagaaggcctatcccctcgccgtgcccctggaggtggaggtggggatgggggaggactggctttccgccaagggttaggggggccctgccgtttagaggaagttcaaggggttgtccctcagaaacgcctccaggggaacgccctctgggcctaccaggaggcctttagccccaaaggtgcgggtgaaggcttccaggccctggg

SEQ ID NO: 3621 - DNA, 3221 bp, Artificial Sequence
  Description of Artificial Sequence: Synthetic DNA sequence of Thermus thermophilus DNA Polymerase A745R
tctagaggaagcatgagcctcaccctggcagacaaggtggtctacgaggaggagatccagaaaagccgcttcatcgccaaggcggcccccgtggcctcggaggaggaggccttggcgtttttggccgagaaccgggagcctgaggccacccacaacggccacgcctacaagatcggcctcctctaccgcttctctgacgacggggagccctcgggcaccgcaggcaggcccatcctccacgccatagaggcccagggcctggaccgggtggcggtcctggtggtgcgctacttcggcggggtgaagctcggggccggggggcttgtgcgggcctacgggggggtggcggcggaggccttaaggcgggcgcccaaggtccccttggtggagcgggtggggctcgccttcctcgtgcccttcgccgaggtgggccgggtctacgccctcctggaggcccgcgcccctgaaggccgaggagacctacaccccggaggcgtgcgcttcgccctcctcctccccaagcccgagcgggaaggtttcctcagggcgctcctggacgccacccggggacaggtggccctggagtagcatggaggcgatgcttccgctctttgaacccaaaggccgggtcctcctggtggacggccaccacctggcctaccgcaccttcttcgccctgaagggcctcaccacgagccggggcgaaccggtgcaggcggtctacggcttcgccaagagcctcctcaaggccctgaaggaggacgggtacaaggccgtcttcgtggtctttgacgccaaggccccctccttccgccacgaggcctacgaggcctacaaggcggggagggccccgacccccgaggacttcccccggcagctcgccctcatcaaggagctggtggacctcctggggtttacccgcctcgaggtccccggctacgaggcggacgacgttctcgccaccctggccaagaaggcggaaaaggaggggtacgaggtgcgcatcctcaccgccgaccgcgacctctaccaactcgtctccgaccgcgtcgccgtcctccaccccgagggccacctcatcaccccggagtggctttgggagaagtacggcctcaggccggagcagtgggtggacttccgcgccctcgtgggggacccctccgacaacctccccggggtcaagggcatcggggagaagaccgccctcaagctcctcaaggagtggggaagcctggaaaacctcctcaagaacctggaccgggtaaagccagaaaacgtccgggagaagatcaaggcccacctggaagacctcaggctctccttggagctctcccgggtgcgcaccgacctccccctggaggtggacctcgcccaggggcgggagcccgaccgggaggggcttagggccttcctggagaggctggagttcggcagcctcctccacgagttcggcctcctggaggcccccgcccccctggaggaggccccctggcccccgccggaaggggccttcgtgggcttcgtcctctcccgccccgagcccatgtgggcggagcttaaagccctggccgcctgcagggacggccgggtgcaccgggcagcagaccccttggcggggctaaaggacctcaaggaggtccggggcctcctcgccaaggacctcgccgtcttggcctcgagggaggggctagacctcgtgcccggggacgaccccatgctcctcgcctacctcctggacccctccaacaccacccccgagggggtggcgcggcgctacgggggggagtggacggaggacgccgcccaccgggccctcctctcggagaggctccatcggaacctccttaagcgcctcgagggggaggagaagctcctttggctctaccacgaggtggaaaagcccctctcccgggtcctggcccacatggaggccaccggggtacggcgggacgtggcctaccttcaggccctttccctggagcttgcggaggagatccgccgcctcgaggaggaggtcttccgcttggcgggccaccccttcaacctcaactcccgggaccagctggaaagggtgctctttgacgagcttaggcttcccgccttggggaagacgcaaaagacaggcaagcgctccaccagcgccgcggtgctggaggccctacgggaggcccaccccatcgtggagaagatcctccagcaccgggagctcaccaagctcaagaacacctacgtggaccccctcccaagcctcgtccacccgaggacgggccgcctccacacccgcttcaaccagacggccacggccacggggaggcttagtagctccgaccccaacctgcagaacatccccgtccgcacccccttgggccagaggatccgccgggccttcgtggccgaggcgggttgggcgttggtggccctggactatagccagatagagctccgcgtcctcgcccacctctccggggacgaaaacctgatcagggtcttccaggaggggaaggacatccacacccagaccgcaagctggatgttcggcgtccccccggaggccgtggaccccctgatgcgccgggcggccaagacggtgaacttcggcgtcctctacggcatgtccgcccataggctctcccaggagcttgccatcccctacgaggaggcggtggcctttatagagcgctacttccaaagcttccccaaggtgcgggcctggatagaaaagaccctggaggaggggaggaagcggggctacgtggaaaccctcttcggaagaaggcgctacgtgcccgacctcaacgcccgggtgaagagcgtcagggagcgagcggagcgcatggccttcaacatgcccgtccagggcaccgccgccgacctcatgaagctcgccatggtgaagctcttcccccgcctccgggagatgggggcccgcatgctcctccaggtccacgacgagctcctcctggaggccccccaagcgcgggccgaggaggtggcggctttggccaaggaggccatggagaaggcctatcccctcgccgtgcccctggaggtggaggtggggatgggggaggactggctttccgccaagggttaggggggccctgccgtttagaggaagttcaaggggttgtccctcagaaacgcctccaggggaacgccctctgggcctaccaggaggcctttagccccaaaggtgcgggtgaaggcttccaggccctggg

SEQ ID NO: 3622 - DNA, 3221 bp, Artificial Sequence
  Description of Artificial Sequence: Synthetic DNA sequence of Thermus thermophilus DNA Polymerase A745C
tctagaggaagcatgagcctcaccctggcagacaaggtggtctacgaggaggagatccagaaaagccgcttcatcgccaaggcggcccccgtggcctcggaggaggaggccttggcgtttttggccgagaaccgggagcctgaggccacccacaacggccacgcctacaagatcggcctcctctaccgcttctctgacgacggggagccctcgggcaccgcaggcaggcccatcctccacgccatagaggcccagggcctggaccgggtggcggtcctggtggtgcgctacttcggcggggtgaagctcggggccggggggcttgtgcgggcctacgggggggtggcggcggaggccttaaggcgggcgcccaaggtccccttggtggagcgggtggggctcgccttcctcgtgcccttcgccgaggtgggccgggtctacgccctcctggaggcccgcgcccctgaaggccgaggagacctacaccccggaggcgtgcgcttcgccctcctcctccccaagcccgagcgggaaggtttcctcagggcgctcctggacgccacccggggacaggtggccctggagtagcatggaggcgatgcttccgctctttgaacccaaaggccgggtcctcctggtggacggccaccacctggcctaccgcaccttcttcgccctgaagggcctcaccacgagccggggcgaaccggtgcaggcggtctacggcttcgccaagagcctcctcaaggccctgaaggaggacgggtacaaggccgtcttcgtggtctttgacgccaaggccccctccttccgccacgaggcctacgaggcctacaaggcggggagggccccgacccccgaggacttcccccggcagctcgccctcatcaaggagctggtggacctcctggggtttacccgcctcgaggtccccggctacgaggcggacgacgttctcgccaccctggccaagaaggcggaaaaggaggggtacgaggtgcgcatcctcaccgccgaccgcgacctctaccaactcgtctccgaccgcgtcgccgtcctccaccccgagggccacctcatcaccccggagtggctttgggagaagtacggcctcaggccggagcagtgggtggacttccgcgccctcgtgggggacccctccgacaacctccccggggtcaagggcatcggggagaagaccgccctcaagctcctcaaggagtggggaagcctggaaaacctcctcaagaacctggaccgggtaaagccagaaaacgtccgggagaagatcaaggcccacctggaagacctcaggctctccttggagctctcccgggtgcgcaccgacctccccctggaggtggacctcgcccaggggcgggagcccgaccgggaggggcttagggccttcctggagaggctggagttcggcagcctcctccacgagttcggcctcctggaggcccccgcccccctggaggaggccccctggcccccgccggaaggggccttcgtgggcttcgtcctctcccgccccgagcccatgtgggcggagcttaaagccctggccgcctgcagggacggccgggtgcaccgggcagcagaccccttggcggggctaaaggacctcaaggaggtccggggcctcctcgccaaggacctcgccgtcttggcctcgagggaggggctagacctcgtgcccggggacgaccccatgctcctcgcctacctcctggacccctccaacaccacccccgagggggtggcgcggcgctacgggggggagtggacggaggacgccgcccaccgggccctcctctcggagaggctccatcggaacctccttaagcgcctcgagggggaggagaagctcctttggctctaccacgaggtggaaaagcccctctcccgggtcctggcccacatggaggccaccggggtacggcgggacgtggcctaccttcaggccctttccctggagcttgcggaggagatccgccgcctcgaggaggaggtcttccgcttggcgggccaccccttcaacctcaactcccgggaccagctggaaagggtgctctttgacgagcttaggcttcccgccttggggaagacgcaaaagacaggcaagcgctccaccagcgccgcggtgctggaggccctacgggaggcccaccccatcgtggagaagatcctccagcaccgggagctcaccaagctcaagaacacctacgtggaccccctcccaagcctcgtccacccgaggacgggccgcctccacacccgcttcaaccagacggccacggccacggggaggcttagtagctccgaccccaacctgcagaacatccccgtccgcacccccttgggccagaggatccgccgggccttcgtggccgaggcgggttgggcgttggtggccctggactatagccagatagagctccgcgtcctcgcccacctctccggggacgaaaacctgatcagggtcttccaggaggggaaggacatccacacccagaccgcaagctggatgttcggcgtccccccggaggccgtggaccccctgatgcgccgggcggccaagacggtgaacttcggcgtcctctacggcatgtccgcccataggctctcccaggagcttgccatcccctacgaggaggcggtggcctttatagagcgctacttccaaagcttccccaaggtgcgggcctggatagaaaagaccctggaggaggggaggaagcggggctacgtggaaaccctcttcggaagaaggcgctacgtgcccgacctcaacgcccgggtgaagagcgtcagggagtgtgcggagcgcatggccttcaacatgcccgtccagggcaccgccgccgacctcatgaagctcgccatggtgaagctcttcccccgcctccgggagatgggggcccgcatgctcctccaggtccacgacgagctcctcctggaggccccccaagcgcgggccgaggaggtggcggctttggccaaggaggccatggagaaggcctatcccctcgccgtgcccctggaggtggaggtggggatgggggaggactggctttccgccaagggttaggggggccctgccgtttagaggaagttcaaggggttgtccctcagaaacgcctccaggggaacgccctctgggcctaccaggaggcctttagccccaaaggtgcgggtgaaggcttccaggccctggg

SEQ ID NO: 3623 - DNA, 3221 bp, Artificial Sequence
  Description of Artificial Sequence: Synthetic DNA sequence of Thermus thermophilus DNA Polymerase A745G
tctagaggaagcatgagcctcaccctggcagacaaggtggtctacgaggaggagatccagaaaagccgcttcatcgccaaggcggcccccgtggcctcggaggaggaggccttggcgtttttggccgagaaccgggagcctgaggccacccacaacggccacgcctacaagatcggcctcctctaccgcttctctgacgacggggagccctcgggcaccgcaggcaggcccatcctccacgccatagaggcccagggcctggaccgggtggcggtcctggtggtgcgctacttcggcggggtgaagctcggggccggggggcttgtgcgggcctacgggggggtggcggcggaggccttaaggcgggcgcccaaggtccccttggtggagcgggtggggctcgccttcctcgtgcccttcgccgaggtgggccgggtctacgccctcctggaggcccgcgcccctgaaggccgaggagacctacaccccggaggcgtgcgcttcgccctcctcctccccaagcccgagcgggaaggtttcctcagggcgctcctggacgccacccggggacaggtggccctggagtagcatggaggcgatgcttccgctctttgaacccaaaggccgggtcctcctggtggacggccaccacctggcctaccgcaccttcttcgccctgaagggcctcaccacgagccggggcgaaccggtgcaggcggtctacggcttcgccaagagcctcctcaaggccctgaaggaggacgggtacaaggccgtcttcgtggtctttgacgccaaggccccctccttccgccacgaggcctacgaggcctacaaggcggggagggccccgacccccgaggacttcccccggcagctcgccctcatcaaggagctggtggacctcctggggtttacccgcctcgaggtccccggctacgaggcggacgacgttctcgccaccctggccaagaaggcggaaaaggaggggtacgaggtgcgcatcctcaccgccgaccgcgacctctaccaactcgtctccgaccgcgtcgccgtcctccaccccgagggccacctcatcaccccggagtggctttgggagaagtacggcctcaggccggagcagtgggtggacttccgcgccctcgtgggggacccctccgacaacctccccggggtcaagggcatcggggagaagaccgccctcaagctcctcaaggagtggggaagcctggaaaacctcctcaagaacctggaccgggtaaagccagaaaacgtccgggagaagatcaaggcccacctggaagacctcaggctctccttggagctctcccgggtgcgcaccgacctccccctggaggtggacctcgcccaggggcgggagcccgaccgggaggggcttagggccttcctggagaggctggagttcggcagcctcctccacgagttcggcctcctggaggcccccgcccccctggaggaggccccctggcccccgccggaaggggccttcgtgggcttcgtcctctcccgccccgagcccatgtgggcggagcttaaagccctggccgcctgcagggacggccgggtgcaccgggcagcagaccccttggcggggctaaaggacctcaaggaggtccggggcctcctcgccaaggacctcgccgtcttggcctcgagggaggggctagacctcgtgcccggggacgaccccatgctcctcgcctacctcctggacccctccaacaccacccccgagggggtggcgcggcgctacgggggggagtggacggaggacgccgcccaccgggccctcctctcggagaggctccatcggaacctccttaagcgcctcgagggggaggagaagctcctttggctctaccacgaggtggaaaagcccctctcccgggtcctggcccacatggaggccaccggggtacggcgggacgtggcctaccttcaggccctttccctggagcttgcggaggagatccgccgcctcgaggaggaggtcttccgcttggcgggccaccccttcaacctcaactcccgggaccagctggaaagggtgctctttgacgagcttaggcttcccgccttggggaagacgcaaaagacaggcaagcgctccaccagcgccgcggtgctggaggccctacgggaggcccaccccatcgtggagaagatcctccagcaccgggagctcaccaagctcaagaacacctacgtggaccccctcccaagcctcgtccacccgaggacgggccgcctccacacccgcttcaaccagacggccacggccacggggaggcttagtagctccgaccccaacctgcagaacatccccgtccgcacccccttgggccagaggatccgccgggccttcgtggccgaggcgggttgggcgttggtggccctggactatagccagatagagctccgcgtcctcgcccacctctccggggacgaaaacctgatcagggtcttccaggaggggaaggacatccacacccagaccgcaagctggatgttcggcgtccccccggaggccgtggaccccctgatgcgccgggcggccaagacggtgaacttcggcgtcctctacggcatgtccgcccataggctctcccaggagcttgccatcccctacgaggaggcggtggcctttatagagcgctacttccaaagcttccccaaggtgcgggcctggatagaaaagaccctggaggaggggaggaagcggggctacgtggaaaccctcttcggaagaaggcgctacgtgcccgacctcaacgcccgggtgaagagcgtcagggagggtgcggagcgcatggccttcaacatgcccgtccagggcaccgccgccgacctcatgaagctcgccatggtgaagctcttcccccgcctccgggagatgggggcccgcatgctcctccaggtccacgacgagctcctcctggaggccccccaagcgcgggccgaggaggtggcggctttggccaaggaggccatggagaaggcctatcccctcgccgtgcccctggaggtggaggtggggatgggggaggactggctttccgccaagggttaggggggccctgccgtttagaggaagttcaaggggttgtccctcagaaacgcctccaggggaacgccctctgggcctaccaggaggcctttagccccaaaggtgcgggtgaaggcttccaggccctggg

SEQ ID NO: 3624 - DNA, 3221 bp, Artificial Sequence
  Description of Artificial Sequence: Synthetic DNA sequence of Thermus thermophilus DNA Polymerase A745Q
tctagaggaagcatgagcctcaccctggcagacaaggtggtctacgaggaggagatccagaaaagccgcttcatcgccaaggcggcccccgtggcctcggaggaggaggccttggcgtttttggccgagaaccgggagcctgaggccacccacaacggccacgcctacaagatcggcctcctctaccgcttctctgacgacggggagccctcgggcaccgcaggcaggcccatcctccacgccatagaggcccagggcctggaccgggtggcggtcctggtggtgcgctacttcggcggggtgaagctcggggccggggggcttgtgcgggcctacgggggggtggcggcggaggccttaaggcgggcgcccaaggtccccttggtggagcgggtggggctcgccttcctcgtgcccttcgccgaggtgggccgggtctacgccctcctggaggcccgcgcccctgaaggccgaggagacctacaccccggaggcgtgcgcttcgccctcctcctccccaagcccgagcgggaaggtttcctcagggcgctcctggacgccacccggggacaggtggccctggagtagcatggaggcgatgcttccgctctttgaacccaaaggccgggtcctcctggtggacggccaccacctggcctaccgcaccttcttcgccctgaagggcctcaccacgagccggggcgaaccggtgcaggcggtctacggcttcgccaagagcctcctcaaggccctgaaggaggacgggtacaaggccgtcttcgtggtctttgacgccaaggccccctccttccgccacgaggcctacgaggcctacaaggcggggagggccccgacccccgaggacttcccccggcagctcgccctcatcaaggagctggtggacctcctggggtttacccgcctcgaggtccccggctacgaggcggacgacgttctcgccaccctggccaagaaggcggaaaaggaggggtacgaggtgcgcatcctcaccgccgaccgcgacctctaccaactcgtctccgaccgcgtcgccgtcctccaccccgagggccacctcatcaccccggagtggctttgggagaagtacggcctcaggccggagcagtgggtggacttccgcgccctcgtgggggacccctccgacaacctccccggggtcaagggcatcggggagaagaccgccctcaagctcctcaaggagtggggaagcctggaaaacctcctcaagaacctggaccgggtaaagccagaaaacgtccgggagaagatcaaggcccacctggaagacctcaggctctccttggagctctcccgggtgcgcaccgacctccccctggaggtggacctcgcccaggggcgggagcccgaccgggaggggcttagggccttcctggagaggctggagttcggcagcctcctccacgagttcggcctcctggaggcccccgcccccctggaggaggccccctggcccccgccggaaggggccttcgtgggcttcgtcctctcccgccccgagcccatgtgggcggagcttaaagccctggccgcctgcagggacggccgggtgcaccgggcagcagaccccttggcggggctaaaggacctcaaggaggtccggggcctcctcgccaaggacctcgccgtcttggcctcgagggaggggctagacctcgtgcccggggacgaccccatgctcctcgcctacctcctggacccctccaacaccacccccgagggggtggcgcggcgctacgggggggagtggacggaggacgccgcccaccgggccctcctctcggagaggctccatcggaacctccttaagcgcctcgagggggaggagaagctcctttggctctaccacgaggtggaaaagcccctctcccgggtcctggcccacatggaggccaccggggtacggcgggacgtggcctaccttcaggccctttccctggagcttgcggaggagatccgccgcctcgaggaggaggtcttccgcttggcgggccaccccttcaacctcaactcccgggaccagctggaaagggtgctctttgacgagcttaggcttcccgccttggggaagacgcaaaagacaggcaagcgctccaccagcgccgcggtgctggaggccctacgggaggcccaccccatcgtggagaagatcctccagcaccgggagctcaccaagctcaagaacacctacgtggaccccctcccaagcctcgtccacccgaggacgggccgcctccacacccgcttcaaccagacggccacggccacggggaggcttagtagctccgaccccaacctgcagaacatccccgtccgcacccccttgggccagaggatccgccgggccttcgtggccgaggcgggttgggcgttggtggccctggactatagccagatagagctccgcgtcctcgcccacctctccggggacgaaaacctgatcagggtcttccaggaggggaaggacatccacacccagaccgcaagctggatgttcggcgtccccccggaggccgtggaccccctgatgcgccgggcggccaagacggtgaacttcggcgtcctctacggcatgtccgcccataggctctcccaggagcttgccatcccctacgaggaggcggtggcctttatagagcgctacttccaaagcttccccaaggtgcgggcctggatagaaaagaccctggaggaggggaggaagcggggctacgtggaaaccctcttcggaagaaggcgctacgtgcccgacctcaacgcccgggtgaagagcgtcagggagcaagcggagcgcatggccttcaacatgcccgtccagggcaccgccgccgacctcatgaagctcgccatggtgaagctcttcccccgcctccgggagatgggggcccgcatgctcctccaggtccacgacgagctcctcctggaggccccccaagcgcgggccgaggaggtggcggctttggccaaggaggccatggagaaggcctatcccctcgccgtgcccctggaggtggaggtggggatgggggaggactggctttccgccaagggttaggggggccctgccgtttagaggaagttcaaggggttgtccctcagaaacgcctccaggggaacgccctctgggcctaccaggaggcctttagccccaaaggtgcgggtgaaggcttccaggccctggg

SEQ ID NO: 3625 - DNA, 3221 bp, Artificial Sequence
  Description of Artificial Sequence: Synthetic DNA sequence of Thermus thermophilus DNA Polymerase A745H
tctagaggaagcatgagcctcaccctggcagacaaggtggtctacgaggaggagatccagaaaagccgcttcatcgccaaggcggcccccgtggcctcggaggaggaggccttggcgtttttggccgagaaccgggagcctgaggccacccacaacggccacgcctacaagatcggcctcctctaccgcttctctgacgacggggagccctcgggcaccgcaggcaggcccatcctccacgccatagaggcccagggcctggaccgggtggcggtcctggtggtgcgctacttcggcggggtgaagctcggggccggggggcttgtgcgggcctacgggggggtggcggcggaggccttaaggcgggcgcccaaggtccccttggtggagcgggtggggctcgccttcctcgtgcccttcgccgaggtgggccgggtctacgccctcctggaggcccgcgcccctgaaggccgaggagacctacaccccggaggcgtgcgcttcgccctcctcctccccaagcccgagcgggaaggtttcctcagggcgctcctggacgccacccggggacaggtggccctggagtagcatggaggcgatgcttccgctctttgaacccaaaggccgggtcctcctggtggacggccaccacctggcctaccgcaccttcttcgccctgaagggcctcaccacgagccggggcgaaccggtgcaggcggtctacggcttcgccaagagcctcctcaaggccctgaaggaggacgggtacaaggccgtcttcgtggtctttgacgccaaggccccctccttccgccacgaggcctacgaggcctacaaggcggggagggccccgacccccgaggacttcccccggcagctcgccctcatcaaggagctggtggacctcctggggtttacccgcctcgaggtccccggctacgaggcggacgacgttctcgccaccctggccaagaaggcggaaaaggaggggtacgaggtgcgcatcctcaccgccgaccgcgacctctaccaactcgtctccgaccgcgtcgccgtcctccaccccgagggccacctcatcaccccggagtggctttgggagaagtacggcctcaggccggagcagtgggtggacttccgcgccctcgtgggggacccctccgacaacctccccggggtcaagggcatcggggagaagaccgccctcaagctcctcaaggagtggggaagcctggaaaacctcctcaagaacctggaccgggtaaagccagaaaacgtccgggagaagatcaaggcccacctggaagacctcaggctctccttggagctctcccgggtgcgcaccgacctccccctggaggtggacctcgcccaggggcgggagcccgaccgggaggggcttagggccttcctggagaggctggagttcggcagcctcctccacgagttcggcctcctggaggcccccgcccccctggaggaggccccctggcccccgccggaaggggccttcgtgggcttcgtcctctcccgccccgagcccatgtgggcggagcttaaagccctggccgcctgcagggacggccgggtgcaccgggcagcagaccccttggcggggctaaaggacctcaaggaggtccggggcctcctcgccaaggacctcgccgtcttggcctcgagggaggggctagacctcgtgcccggggacgaccccatgctcctcgcctacctcctggacccctccaacaccacccccgagggggtggcgcggcgctacgggggggagtggacggaggacgccgcccaccgggccctcctctcggagaggctccatcggaacctccttaagcgcctcgagggggaggagaagctcctttggctctaccacgaggtggaaaagcccctctcccgggtcctggcccacatggaggccaccggggtacggcgggacgtggcctaccttcaggccctttccctggagcttgcggaggagatccgccgcctcgaggaggaggtcttccgcttggcgggccaccccttcaacctcaactcccgggaccagctggaaagggtgctctttgacgagcttaggcttcccgccttggggaagacgcaaaagacaggcaagcgctccaccagcgccgcggtgctggaggccctacgggaggcccaccccatcgtggagaagatcctccagcaccgggagctcaccaagctcaagaacacctacgtggaccccctcccaagcctcgtccacccgaggacgggccgcctccacacccgcttcaaccagacggccacggccacggggaggcttagtagctccgaccccaacctgcagaacatccccgtccgcacccccttgggccagaggatccgccgggccttcgtggccgaggcgggttgggcgttggtggccctggactatagccagatagagctccgcgtcctcgcccacctctccggggacgaaaacctgatcagggtcttccaggaggggaaggacatccacacccagaccgcaagctggatgttcggcgtccccccggaggccgtggaccccctgatgcgccgggcggccaagacggtgaacttcggcgtcctctacggcatgtccgcccataggctctcccaggagcttgccatcccctacgaggaggcggtggcctttatagagcgctacttccaaagcttccccaaggtgcgggcctggatagaaaagaccctggaggaggggaggaagcggggctacgtggaaaccctcttcggaagaaggcgctacgtgcccgacctcaacgcccgggtgaagagcgtcagggagcatgcggagcgcatggccttcaacatgcccgtccagggcaccgccgccgacctcatgaagctcgccatggtgaagctcttcccccgcctccgggagatgggggcccgcatgctcctccaggtccacgacgagctcctcctggaggccccccaagcgcgggccgaggaggtggcggctttggccaaggaggccatggagaaggcctatcccctcgccgtgcccctggaggtggaggtggggatgggggaggactggctttccgccaagggttaggggggccctgccgtttagaggaagttcaaggggttgtccctcagaaacgcctccaggggaacgccctctgggcctaccaggaggcctttagccccaaaggtgcgggtgaaggcttccaggccctggg

SEQ ID NO: 3626 - DNA, 3221 bp, Artificial Sequence
  Description of Artificial Sequence: Synthetic DNA sequence of Thermus thermophilus DNA Polymerase A745I
tctagaggaagcatgagcctcaccctggcagacaaggtggtctacgaggaggagatccagaaaagccgcttcatcgccaaggcggcccccgtggcctcggaggaggaggccttggcgtttttggccgagaaccgggagcctgaggccacccacaacggccacgcctacaagatcggcctcctctaccgcttctctgacgacggggagccctcgggcaccgcaggcaggcccatcctccacgccatagaggcccagggcctggaccgggtggcggtcctggtggtgcgctacttcggcggggtgaagctcggggccggggggcttgtgcgggcctacgggggggtggcggcggaggccttaaggcgggcgcccaaggtccccttggtggagcgggtggggctcgccttcctcgtgcccttcgccgaggtgggccgggtctacgccctcctggaggcccgcgcccctgaaggccgaggagacctacaccccggaggcgtgcgcttcgccctcctcctccccaagcccgagcgggaaggtttcctcagggcgctcctggacgccacccggggacaggtggccctggagtagcatggaggcgatgcttccgctctttgaacccaaaggccgggtcctcctggtggacggccaccacctggcctaccgcaccttcttcgccctgaagggcctcaccacgagccggggcgaaccggtgcaggcggtctacggcttcgccaagagcctcctcaaggccctgaaggaggacgggtacaaggccgtcttcgtggtctttgacgccaaggccccctccttccgccacgaggcctacgaggcctacaaggcggggagggccccgacccccgaggacttcccccggcagctcgccctcatcaaggagctggtggacctcctggggtttacccgcctcgaggtccccggctacgaggcggacgacgttctcgccaccctggccaagaaggcggaaaaggaggggtacgaggtgcgcatcctcaccgccgaccgcgacctctaccaactcgtctccgaccgcgtcgccgtcctccaccccgagggccacctcatcaccccggagtggctttgggagaagtacggcctcaggccggagcagtgggtggacttccgcgccctcgtgggggacccctccgacaacctccccggggtcaagggcatcggggagaagaccgccctcaagctcctcaaggagtggggaagcctggaaaacctcctcaagaacctggaccgggtaaagccagaaaacgtccgggagaagatcaaggcccacctggaagacctcaggctctccttggagctctcccgggtgcgcaccgacctccccctggaggtggacctcgcccaggggcgggagcccgaccgggaggggcttagggccttcctggagaggctggagttcggcagcctcctccacgagttcggcctcctggaggcccccgcccccctggaggaggccccctggcccccgccggaaggggccttcgtgggcttcgtcctctcccgccccgagcccatgtgggcggagcttaaagccctggccgcctgcagggacggccgggtgcaccgggcagcagaccccttggcggggctaaaggacctcaaggaggtccggggcctcctcgccaaggacctcgccgtcttggcctcgagggaggggctagacctcgtgcccggggacgaccccatgctcctcgcctacctcctggacccctccaacaccacccccgagggggtggcgcggcgctacgggggggagtggacggaggacgccgcccaccgggccctcctctcggagaggctccatcggaacctccttaagcgcctcgagggggaggagaagctcctttggctctaccacgaggtggaaaagcccctctcccgggtcctggcccacatggaggccaccggggtacggcgggacgtggcctaccttcaggccctttccctggagcttgcggaggagatccgccgcctcgaggaggaggtcttccgcttggcgggccaccccttcaacctcaactcccgggaccagctggaaagggtgctctttgacgagcttaggcttcccgccttggggaagacgcaaaagacaggcaagcgctccaccagcgccgcggtgctggaggccctacgggaggcccaccccatcgtggagaagatcctccagcaccgggagctcaccaagctcaagaacacctacgtggaccccctcccaagcctcgtccacccgaggacgggccgcctccacacccgcttcaaccagacggccacggccacggggaggcttagtagctccgaccccaacctgcagaacatccccgtccgcacccccttgggccagaggatccgccgggccttcgtggccgaggcgggttgggcgttggtggccctggactatagccagatagagctccgcgtcctcgcccacctctccggggacgaaaacctgatcagggtcttccaggaggggaaggacatccacacccagaccgcaagctggatgttcggcgtccccccggaggccgtggaccccctgatgcgccgggcggccaagacggtgaacttcggcgtcctctacggcatgtccgcccataggctctcccaggagcttgccatcccctacgaggaggcggtggcctttatagagcgctacttccaaagcttccccaaggtgcgggcctggatagaaaagaccctggaggaggggaggaagcggggctacgtggaaaccctcttcggaagaaggcgctacgtgcccgacctcaacgcccgggtgaagagcgtcagggagattgcggagcgcatggccttcaacatgcccgtccagggcaccgccgccgacctcatgaagctcgccatggtgaagctcttcccccgcctccgggagatgggggcccgcatgctcctccaggtccacgacgagctcctcctggaggccccccaagcgcgggccgaggaggtggcggctttggccaaggaggccatggagaaggcctatcccctcgccgtgcccctggaggtggaggtggggatgggggaggactggctttccgccaagggttaggggggccctgccgtttagaggaagttcaaggggttgtccctcagaaacgcctccaggggaacgccctctgggcctaccaggaggcctttagccccaaaggtgcgggtgaaggcttccaggccctggg

SEQ ID NO: 3627 - DNA, 3221 bp, Artificial Sequence
  Description of Artificial Sequence: Synthetic DNA sequence of Thermus thermophilus DNA Polymerase A745L
tctagaggaagcatgagcctcaccctggcagacaaggtggtctacgaggaggagatccagaaaagccgcttcatcgccaaggcggcccccgtggcctcggaggaggaggccttggcgtttttggccgagaaccgggagcctgaggccacccacaacggccacgcctacaagatcggcctcctctaccgcttctctgacgacggggagccctcgggcaccgcaggcaggcccatcctccacgccatagaggcccagggcctggaccgggtggcggtcctggtggtgcgctacttcggcggggtgaagctcggggccggggggcttgtgcgggcctacgggggggtggcggcggaggccttaaggcgggcgcccaaggtccccttggtggagcgggtggggctcgccttcctcgtgcccttcgccgaggtgggccgggtctacgccctcctggaggcccgcgcccctgaaggccgaggagacctacaccccggaggcgtgcgcttcgccctcctcctccccaagcccgagcgggaaggtttcctcagggcgctcctggacgccacccggggacaggtggccctggagtagcatggaggcgatgcttccgctctttgaacccaaaggccgggtcctcctggtggacggccaccacctggcctaccgcaccttcttcgccctgaagggcctcaccacgagccggggcgaaccggtgcaggcggtctacggcttcgccaagagcctcctcaaggccctgaaggaggacgggtacaaggccgtcttcgtggtctttgacgccaaggccccctccttccgccacgaggcctacgaggcctacaaggcggggagggccccgacccccgaggacttcccccggcagctcgccctcatcaaggagctggtggacctcctggggtttacccgcctcgaggtccccggctacgaggcggacgacgttctcgccaccctggccaagaaggcggaaaaggaggggtacgaggtgcgcatcctcaccgccgaccgcgacctctaccaactcgtctccgaccgcgtcgccgtcctccaccccgagggccacctcatcaccccggagtggctttgggagaagtacggcctcaggccggagcagtgggtggacttccgcgccctcgtgggggacccctccgacaacctccccggggtcaagggcatcggggagaagaccgccctcaagctcctcaaggagtggggaagcctggaaaacctcctcaagaacctggaccgggtaaagccagaaaacgtccgggagaagatcaaggcccacctggaagacctcaggctctccttggagctctcccgggtgcgcaccgacctccccctggaggtggacctcgcccaggggcgggagcccgaccgggaggggcttagggccttcctggagaggctggagttcggcagcctcctccacgagttcggcctcctggaggcccccgcccccctggaggaggccccctggcccccgccggaaggggccttcgtgggcttcgtcctctcccgccccgagcccatgtgggcggagcttaaagccctggccgcctgcagggacggccgggtgcaccgggcagcagaccccttggcggggctaaaggacctcaaggaggtccggggcctcctcgccaaggacctcgccgtcttggcctcgagggaggggctagacctcgtgcccggggacgaccccatgctcctcgcctacctcctggacccctccaacaccacccccgagggggtggcgcggcgctacgggggggagtggacggaggacgccgcccaccgggccctcctctcggagaggctccatcggaacctccttaagcgcctcgagggggaggagaagctcctttggctctaccacgaggtggaaaagcccctctcccgggtcctggcccacatggaggccaccggggtacggcgggacgtggcctaccttcaggccctttccctggagcttgcggaggagatccgccgcctcgaggaggaggtcttccgcttggcgggccaccccttcaacctcaactcccgggaccagctggaaagggtgctctttgacgagcttaggcttcccgccttggggaagacgcaaaagacaggcaagcgctccaccagcgccgcggtgctggaggccctacgggaggcccaccccatcgtggagaagatcctccagcaccgggagctcaccaagctcaagaacacctacgtggaccccctcccaagcctcgtccacccgaggacgggccgcctccacacccgcttcaaccagacggccacggccacggggaggcttagtagctccgaccccaacctgcagaacatccccgtccgcacccccttgggccagaggatccgccgggccttcgtggccgaggcgggttgggcgttggtggccctggactatagccagatagagctccgcgtcctcgcccacctctccggggacgaaaacctgatcagggtcttccaggaggggaaggacatccacacccagaccgcaagctggatgttcggcgtccccccggaggccgtggaccccctgatgcgccgggcggccaagacggtgaacttcggcgtcctctacggcatgtccgcccataggctctcccaggagcttgccatcccctacgaggaggcggtggcctttatagagcgctacttccaaagcttccccaaggtgcgggcctggatagaaaagaccctggaggaggggaggaagcggggctacgtggaaaccctcttcggaagaaggcgctacgtgcccgacctcaacgcccgggtgaagagcgtcagggagttagcggagcgcatggccttcaacatgcccgtccagggcaccgccgccgacctcatgaagctcgccatggtgaagctcttcccccgcctccgggagatgggggcccgcatgctcctccaggtccacgacgagctcctcctggaggccccccaagcgcgggccgaggaggtggcggctttggccaaggaggccatggagaaggcctatcccctcgccgtgcccctggaggtggaggtggggatgggggaggactggctttccgccaagggttaggggggccctgccgtttagaggaagttcaaggggttgtccctcagaaacgcctccaggggaacgccctctgggcctaccaggaggcctttagccccaaaggtgcgggtgaaggcttccaggccctggg

SEQ ID NO: 3628 - DNA, 3221 bp, Artificial Sequence
  Description of Artificial Sequence: Synthetic DNA sequence of Thermus thermophilus DNA Polymerase A745K
tctagaggaagcatgagcctcaccctggcagacaaggtggtctacgaggaggagatccagaaaagccgcttcatcgccaaggcggcccccgtggcctcggaggaggaggccttggcgtttttggccgagaaccgggagcctgaggccacccacaacggccacgcctacaagatcggcctcctctaccgcttctctgacgacggggagccctcgggcaccgcaggcaggcccatcctccacgccatagaggcccagggcctggaccgggtggcggtcctggtggtgcgctacttcggcggggtgaagctcggggccggggggcttgtgcgggcctacgggggggtggcggcggaggccttaaggcgggcgcccaaggtccccttggtggagcgggtggggctcgccttcctcgtgcccttcgccgaggtgggccgggtctacgccctcctggaggcccgcgcccctgaaggccgaggagacctacaccccggaggcgtgcgcttcgccctcctcctccccaagcccgagcgggaaggtttcctcagggcgctcctggacgccacccggggacaggtggccctggagtagcatggaggcgatgcttccgctctttgaacccaaaggccgggtcctcctggtggacggccaccacctggcctaccgcaccttcttcgccctgaagggcctcaccacgagccggggcgaaccggtgcaggcggtctacggcttcgccaagagcctcctcaaggccctgaaggaggacgggtacaaggccgtcttcgtggtctttgacgccaaggccccctccttccgccacgaggcctacgaggcctacaaggcggggagggccccgacccccgaggacttcccccggcagctcgccctcatcaaggagctggtggacctcctggggtttacccgcctcgaggtccccggctacgaggcggacgacgttctcgccaccctggccaagaaggcggaaaaggaggggtacgaggtgcgcatcctcaccgccgaccgcgacctctaccaactcgtctccgaccgcgtcgccgtcctccaccccgagggccacctcatcaccccggagtggctttgggagaagtacggcctcaggccggagcagtgggtggacttccgcgccctcgtgggggacccctccgacaacctccccggggtcaagggcatcggggagaagaccgccctcaagctcctcaaggagtggggaagcctggaaaacctcctcaagaacctggaccgggtaaagccagaaaacgtccgggagaagatcaaggcccacctggaagacctcaggctctccttggagctctcccgggtgcgcaccgacctccccctggaggtggacctcgcccaggggcgggagcccgaccgggaggggcttagggccttcctggagaggctggagttcggcagcctcctccacgagttcggcctcctggaggcccccgcccccctggaggaggccccctggcccccgccggaaggggccttcgtgggcttcgtcctctcccgccccgagcccatgtgggcggagcttaaagccctggccgcctgcagggacggccgggtgcaccgggcagcagaccccttggcggggctaaaggacctcaaggaggtccggggcctcctcgccaaggacctcgccgtcttggcctcgagggaggggctagacctcgtgcccggggacgaccccatgctcctcgcctacctcctggacccctccaacaccacccccgagggggtggcgcggcgctacgggggggagtggacggaggacgccgcccaccgggccctcctctcggagaggctccatcggaacctccttaagcgcctcgagggggaggagaagctcctttggctctaccacgaggtggaaaagcccctctcccgggtcctggcccacatggaggccaccggggtacggcgggacgtggcctaccttcaggccctttccctggagcttgcggaggagatccgccgcctcgaggaggaggtcttccgcttggcgggccaccccttcaacctcaactcccgggaccagctggaaagggtgctctttgacgagcttaggcttcccgccttggggaagacgcaaaagacaggcaagcgctccaccagcgccgcggtgctggaggccctacgggaggcccaccccatcgtggagaagatcctccagcaccgggagctcaccaagctcaagaacacctacgtggaccccctcccaagcctcgtccacccgaggacgggccgcctccacacccgcttcaaccagacggccacggccacggggaggcttagtagctccgaccccaacctgcagaacatccccgtccgcacccccttgggccagaggatccgccgggccttcgtggccgaggcgggttgggcgttggtggccctggactatagccagatagagctccgcgtcctcgcccacctctccggggacgaaaacctgatcagggtcttccaggaggggaaggacatccacacccagaccgcaagctggatgttcggcgtccccccggaggccgtggaccccctgatgcgccgggcggccaagacggtgaacttcggcgtcctctacggcatgtccgcccataggctctcccaggagcttgccatcccctacgaggaggcggtggcctttatagagcgctacttccaaagcttccccaaggtgcgggcctggatagaaaagaccctggaggaggggaggaagcggggctacgtggaaaccctcttcggaagaaggcgctacgtgcccgacctcaacgcccgggtgaagagcgtcagggagaaagcggagcgcatggccttcaacatgcccgtccagggcaccgccgccgacctcatgaagctcgccatggtgaagctcttcccccgcctccgggagatgggggcccgcatgctcctccaggtccacgacgagctcctcctggaggccccccaagcgcgggccgaggaggtggcggctttggccaaggaggccatggagaaggcctatcccctcgccgtgcccctggaggtggaggtggggatgggggaggactggctttccgccaagggttaggggggccctgccgtttagaggaagttcaaggggttgtccctcagaaacgcctccaggggaacgccctctgggcctaccaggaggcctttagccccaaaggtgcgggtgaaggcttccaggccctggg

SEQ ID NO: 3629 - DNA, 3221 bp, Artificial Sequence
  Description of Artificial Sequence: Synthetic DNA sequence of Thermus thermophilus DNA Polymerase A745E
tctagaggaagcatgagcctcaccctggcagacaaggtggtctacgaggaggagatccagaaaagccgcttcatcgccaaggcggcccccgtggcctcggaggaggaggccttggcgtttttggccgagaaccgggagcctgaggccacccacaacggccacgcctacaagatcggcctcctctaccgcttctctgacgacggggagccctcgggcaccgcaggcaggcccatcctccacgccatagaggcccagggcctggaccgggtggcggtcctggtggtgcgctacttcggcggggtgaagctcggggccggggggcttgtgcgggcctacgggggggtggcggcggaggccttaaggcgggcgcccaaggtccccttggtggagcgggtggggctcgccttcctcgtgcccttcgccgaggtgggccgggtctacgccctcctggaggcccgcgcccctgaaggccgaggagacctacaccccggaggcgtgcgcttcgccctcctcctccccaagcccgagcgggaaggtttcctcagggcgctcctggacgccacccggggacaggtggccctggagtagcatggaggcgatgcttccgctctttgaacccaaaggccgggtcctcctggtggacggccaccacctggcctaccgcaccttcttcgccctgaagggcctcaccacgagccggggcgaaccggtgcaggcggtctacggcttcgccaagagcctcctcaaggccctgaaggaggacgggtacaaggccgtcttcgtggtctttgacgccaaggccccctccttccgccacgaggcctacgaggcctacaaggcggggagggccccgacccccgaggacttcccccggcagctcgccctcatcaaggagctggtggacctcctggggtttacccgcctcgaggtccccggctacgaggcggacgacgttctcgccaccctggccaagaaggcggaaaaggaggggtacgaggtgcgcatcctcaccgccgaccgcgacctctaccaactcgtctccgaccgcgtcgccgtcctccaccccgagggccacctcatcaccccggagtggctttgggagaagtacggcctcaggccggagcagtgggtggacttccgcgccctcgtgggggacccctccgacaacctccccggggtcaagggcatcggggagaagaccgccctcaagctcctcaaggagtggggaagcctggaaaacctcctcaagaacctggaccgggtaaagccagaaaacgtccgggagaagatcaaggcccacctggaagacctcaggctctccttggagctctcccgggtgcgcaccgacctccccctggaggtggacctcgcccaggggcgggagcccgaccgggaggggcttagggccttcctggagaggctggagttcggcagcctcctccacgagttcggcctcctggaggcccccgcccccctggaggaggccccctggcccccgccggaaggggccttcgtgggcttcgtcctctcccgccccgagcccatgtgggcggagcttaaagccctggccgcctgcagggacggccgggtgcaccgggcagcagaccccttggcggggctaaaggacctcaaggaggtccggggcctcctcgccaaggacctcgccgtcttggcctcgagggaggggctagacctcgtgcccggggacgaccccatgctcctcgcctacctcctggacccctccaacaccacccccgagggggtggcgcggcgctacgggggggagtggacggaggacgccgcccaccgggccctcctctcggagaggctccatcggaacctccttaagcgcctcgagggggaggagaagctcctttggctctaccacgaggtggaaaagcccctctcccgggtcctggcccacatggaggccaccggggtacggcgggacgtggcctaccttcaggccctttccctggagcttgcggaggagatccgccgcctcgaggaggaggtcttccgcttggcgggccaccccttcaacctcaactcccgggaccagctggaaagggtgctctttgacgagcttaggcttcccgccttggggaagacgcaaaagacaggcaagcgctccaccagcgccgcggtgctggaggccctacgggaggcccaccccatcgtggagaagatcctccagcaccgggagctcaccaagctcaagaacacctacgtggaccccctcccaagcctcgtccacccgaggacgggccgcctccacacccgcttcaaccagacggccacggccacggggaggcttagtagctccgaccccaacctgcagaacatccccgtccgcacccccttgggccagaggatccgccgggccttcgtggccgaggcgggttgggcgttggtggccctggactatagccagatagagctccgcgtcctcgcccacctctccggggacgaaaacctgatcagggtcttccaggaggggaaggacatccacacccagaccgcaagctggatgttcggcgtccccccggaggccgtggaccccctgatgcgccgggcggccaagacggtgaacttcggcgtcctctacggcatgtccgcccataggctctcccaggagcttgccatcccctacgaggaggcggtggcctttatagagcgctacttccaaagcttccccaaggtgcgggcctggatagaaaagaccctggaggaggggaggaagcggggctacgtggaaaccctcttcggaagaaggcgctacgtgcccgacctcaacgcccgggtgaagagcgtcagggaggaagcggagcgcatggccttcaacatgcccgtccagggcaccgccgccgacctcatgaagctcgccatggtgaagctcttcccccgcctccgggagatgggggcccgcatgctcctccaggtccacgacgagctcctcctggaggccccccaagcgcgggccgaggaggtggcggctttggccaaggaggccatggagaaggcctatcccctcgccgtgcccctggaggtggaggtggggatgggggaggactggctttccgccaagggttaggggggccctgccgtttagaggaagttcaaggggttgtccctcagaaacgcctccaggggaacgccctctgggcctaccaggaggcctttagccccaaaggtgcgggtgaaggcttccaggccctggg

SEQ ID NO: 3630 - DNA, 3221 bp, Artificial Sequence
  Description of Artificial Sequence: Synthetic DNA sequence of Thermus thermophilus DNA Polymerase A745D
tctagaggaagcatgagcctcaccctggcagacaaggtggtctacgaggaggagatccagaaaagccgcttcatcgccaaggcggcccccgtggcctcggaggaggaggccttggcgtttttggccgagaaccgggagcctgaggccacccacaacggccacgcctacaagatcggcctcctctaccgcttctctgacgacggggagccctcgggcaccgcaggcaggcccatcctccacgccatagaggcccagggcctggaccgggtggcggtcctggtggtgcgctacttcggcggggtgaagctcggggccggggggcttgtgcgggcctacgggggggtggcggcggaggccttaaggcgggcgcccaaggtccccttggtggagcgggtggggctcgccttcctcgtgcccttcgccgaggtgggccgggtctacgccctcctggaggcccgcgcccctgaaggccgaggagacctacaccccggaggcgtgcgcttcgccctcctcctccccaagcccgagcgggaaggtttcctcagggcgctcctggacgccacccggggacaggtggccctggagtagcatggaggcgatgcttccgctctttgaacccaaaggccgggtcctcctggtggacggccaccacctggcctaccgcaccttcttcgccctgaagggcctcaccacgagccggggcgaaccggtgcaggcggtctacggcttcgccaagagcctcctcaaggccctgaaggaggacgggtacaaggccgtcttcgtggtctttgacgccaaggccccctccttccgccacgaggcctacgaggcctacaaggcggggagggccccgacccccgaggacttcccccggcagctcgccctcatcaaggagctggtggacctcctggggtttacccgcctcgaggtccccggctacgaggcggacgacgttctcgccaccctggccaagaaggcggaaaaggaggggtacgaggtgcgcatcctcaccgccgaccgcgacctctaccaactcgtctccgaccgcgtcgccgtcctccaccccgagggccacctcatcaccccggagtggctttgggagaagtacggcctcaggccggagcagtgggtggacttccgcgccctcgtgggggacccctccgacaacctccccggggtcaagggcatcggggagaagaccgccctcaagctcctcaaggagtggggaagcctggaaaacctcctcaagaacctggaccgggtaaagccagaaaacgtccgggagaagatcaaggcccacctggaagacctcaggctctccttggagctctcccgggtgcgcaccgacctccccctggaggtggacctcgcccaggggcgggagcccgaccgggaggggcttagggccttcctggagaggctggagttcggcagcctcctccacgagttcggcctcctggaggcccccgcccccctggaggaggccccctggcccccgccggaaggggccttcgtgggcttcgtcctctcccgccccgagcccatgtgggcggagcttaaagccctggccgcctgcagggacggccgggtgcaccgggcagcagaccccttggcggggctaaaggacctcaaggaggtccggggcctcctcgccaaggacctcgccgtcttggcctcgagggaggggctagacctcgtgcccggggacgaccccatgctcctcgcctacctcctggacccctccaacaccacccccgagggggtggcgcggcgctacgggggggagtggacggaggacgccgcccaccgggccctcctctcggagaggctccatcggaacctccttaagcgcctcgagggggaggagaagctcctttggctctaccacgaggtggaaaagcccctctcccgggtcctggcccacatggaggccaccggggtacggcgggacgtggcctaccttcaggccctttccctggagcttgcggaggagatccgccgcctcgaggaggaggtcttccgcttggcgggccaccccttcaacctcaactcccgggaccagctggaaagggtgctctttgacgagcttaggcttcccgccttggggaagacgcaaaagacaggcaagcgctccaccagcgccgcggtgctggaggccctacgggaggcccaccccatcgtggagaagatcctccagcaccgggagctcaccaagctcaagaacacctacgtggaccccctcccaagcctcgtccacccgaggacgggccgcctccacacccgcttcaaccagacggccacggccacggggaggcttagtagctccgaccccaacctgcagaacatccccgtccgcacccccttgggccagaggatccgccgggccttcgtggccgaggcgggttgggcgttggtggccctggactatagccagatagagctccgcgtcctcgcccacctctccggggacgaaaacctgatcagggtcttccaggaggggaaggacatccacacccagaccgcaagctggatgttcggcgtccccccggaggccgtggaccccctgatgcgccgggcggccaagacggtgaacttcggcgtcctctacggcatgtccgcccataggctctcccaggagcttgccatcccctacgaggaggcggtggcctttatagagcgctacttccaaagcttccccaaggtgcgggcctggatagaaaagaccctggaggaggggaggaagcggggctacgtggaaaccctcttcggaagaaggcgctacgtgcccgacctcaacgcccgggtgaagagcgtcagggaggatgcggagcgcatggccttcaacatgcccgtccagggcaccgccgccgacctcatgaagctcgccatggtgaagctcttcccccgcctccgggagatgggggcccgcatgctcctccaggtccacgacgagctcctcctggaggccccccaagcgcgggccgaggaggtggcggctttggccaaggaggccatggagaaggcctatcccctcgccgtgcccctggaggtggaggtggggatgggggaggactggctttccgccaagggttaggggggccctgccgtttagaggaagttcaaggggttgtccctcagaaacgcctccaggggaacgccctctgggcctaccaggaggcctttagccccaaaggtgcgggtgaaggcttccaggccctggg

SEQ ID NO: 3631 - DNA, 3221 bp, Artificial Sequence
  Description of Artificial Sequence: Synthetic DNA sequence of Thermus thermophilus DNA Polymerase A745F
tctagaggaagcatgagcctcaccctggcagacaaggtggtctacgaggaggagatccagaaaagccgcttcatcgccaaggcggcccccgtggcctcggaggaggaggccttggcgtttttggccgagaaccgggagcctgaggccacccacaacggccacgcctacaagatcggcctcctctaccgcttctctgacgacggggagccctcgggcaccgcaggcaggcccatcctccacgccatagaggcccagggcctggaccgggtggcggtcctggtggtgcgctacttcggcggggtgaagctcggggccggggggcttgtgcgggcctacgggggggtggcggcggaggccttaaggcgggcgcccaaggtccccttggtggagcgggtggggctcgccttcctcgtgcccttcgccgaggtgggccgggtctacgccctcctggaggcccgcgcccctgaaggccgaggagacctacaccccggaggcgtgcgcttcgccctcctcctccccaagcccgagcgggaaggtttcctcagggcgctcctggacgccacccggggacaggtggccctggagtagcatggaggcgatgcttccgctctttgaacccaaaggccgggtcctcctggtggacggccaccacctggcctaccgcaccttcttcgccctgaagggcctcaccacgagccggggcgaaccggtgcaggcggtctacggcttcgccaagagcctcctcaaggccctgaaggaggacgggtacaaggccgtcttcgtggtctttgacgccaaggccccctccttccgccacgaggcctacgaggcctacaaggcggggagggccccgacccccgaggacttcccccggcagctcgccctcatcaaggagctggtggacctcctggggtttacccgcctcgaggtccccggctacgaggcggacgacgttctcgccaccctggccaagaaggcggaaaaggaggggtacgaggtgcgcatcctcaccgccgaccgcgacctctaccaactcgtctccgaccgcgtcgccgtcctccaccccgagggccacctcatcaccccggagtggctttgggagaagtacggcctcaggccggagcagtgggtggacttccgcgccctcgtgggggacccctccgacaacctccccggggtcaagggcatcggggagaagaccgccctcaagctcctcaaggagtggggaagcctggaaaacctcctcaagaacctggaccgggtaaagccagaaaacgtccgggagaagatcaaggcccacctggaagacctcaggctctccttggagctctcccgggtgcgcaccgacctccccctggaggtggacctcgcccaggggcgggagcccgaccgggaggggcttagggccttcctggagaggctggagttcggcagcctcctccacgagttcggcctcctggaggcccccgcccccctggaggaggccccctggcccccgccggaaggggccttcgtgggcttcgtcctctcccgccccgagcccatgtgggcggagcttaaagccctggccgcctgcagggacggccgggtgcaccgggcagcagaccccttggcggggctaaaggacctcaaggaggtccggggcctcctcgccaaggacctcgccgtcttggcctcgagggaggggctagacctcgtgcccggggacgaccccatgctcctcgcctacctcctggacccctccaacaccacccccgagggggtggcgcggcgctacgggggggagtggacggaggacgccgcccaccgggccctcctctcggagaggctccatcggaacctccttaagcgcctcgagggggaggagaagctcctttggctctaccacgaggtggaaaagcccctctcccgggtcctggcccacatggaggccaccggggtacggcgggacgtggcctaccttcaggccctttccctggagcttgcggaggagatccgccgcctcgaggaggaggtcttccgcttggcgggccaccccttcaacctcaactcccgggaccagctggaaagggtgctctttgacgagcttaggcttcccgccttggggaagacgcaaaagacaggcaagcgctccaccagcgccgcggtgctggaggccctacgggaggcccaccccatcgtggagaagatcctccagcaccgggagctcaccaagctcaagaacacctacgtggaccccctcccaagcctcgtccacccgaggacgggccgcctccacacccgcttcaaccagacggccacggccacggggaggcttagtagctccgaccccaacctgcagaacatccccgtccgcacccccttgggccagaggatccgccgggccttcgtggccgaggcgggttgggcgttggtggccctggactatagccagatagagctccgcgtcctcgcccacctctccggggacgaaaacctgatcagggtcttccaggaggggaaggacatccacacccagaccgcaagctggatgttcggcgtccccccggaggccgtggaccccctgatgcgccgggcggccaagacggtgaacttcggcgtcctctacggcatgtccgcccataggctctcccaggagcttgccatcccctacgaggaggcggtggcctttatagagcgctacttccaaagcttccccaaggtgcgggcctggatagaaaagaccctggaggaggggaggaagcggggctacgtggaaaccctcttcggaagaaggcgctacgtgcccgacctcaacgcccgggtgaagagcgtcagggagtttgcggagcgcatggccttcaacatgcccgtccagggcaccgccgccgacctcatgaagctcgccatggtgaagctcttcccccgcctccgggagatgggggcccgcatgctcctccaggtccacgacgagctcctcctggaggccccccaagcgcgggccgaggaggtggcggctttggccaaggaggccatggagaaggcctatcccctcgccgtgcccctggaggtggaggtggggatgggggaggactggctttccgccaagggttaggggggccctgccgtttagaggaagttcaaggggttgtccctcagaaacgcctccaggggaacgccctctgggcctaccaggaggcctttagccccaaaggtgcgggtgaaggcttccaggccctggg

SEQ ID NO: 3632 - DNA, 3221 bp, Artificial Sequence
  Description of Artificial Sequence: Synthetic DNA sequence of Thermus thermophilus DNA Polymerase A745S
tctagaggaagcatgagcctcaccctggcagacaaggtggtctacgaggaggagatccagaaaagccgcttcatcgccaaggcggcccccgtggcctcggaggaggaggccttggcgtttttggccgagaaccgggagcctgaggccacccacaacggccacgcctacaagatcggcctcctctaccgcttctctgacgacggggagccctcgggcaccgcaggcaggcccatcctccacgccatagaggcccagggcctggaccgggtggcggtcctggtggtgcgctacttcggcggggtgaagctcggggccggggggcttgtgcgggcctacgggggggtggcggcggaggccttaaggcgggcgcccaaggtccccttggtggagcgggtggggctcgccttcctcgtgcccttcgccgaggtgggccgggtctacgccctcctggaggcccgcgcccctgaaggccgaggagacctacaccccggaggcgtgcgcttcgccctcctcctccccaagcccgagcgggaaggtttcctcagggcgctcctggacgccacccggggacaggtggccctggagtagcatggaggcgatgcttccgctctttgaacccaaaggccgggtcctcctggtggacggccaccacctggcctaccgcaccttcttcgccctgaagggcctcaccacgagccggggcgaaccggtgcaggcggtctacggcttcgccaagagcctcctcaaggccctgaaggaggacgggtacaaggccgtcttcgtggtctttgacgccaaggccccctccttccgccacgaggcctacgaggcctacaaggcggggagggccccgacccccgaggacttcccccggcagctcgccctcatcaaggagctggtggacctcctggggtttacccgcctcgaggtccccggctacgaggcggacgacgttctcgccaccctggccaagaaggcggaaaaggaggggtacgaggtgcgcatcctcaccgccgaccgcgacctctaccaactcgtctccgaccgcgtcgccgtcctccaccccgagggccacctcatcaccccggagtggctttgggagaagtacggcctcaggccggagcagtgggtggacttccgcgccctcgtgggggacccctccgacaacctccccggggtcaagggcatcggggagaagaccgccctcaagctcctcaaggagtggggaagcctggaaaacctcctcaagaacctggaccgggtaaagccagaaaacgtccgggagaagatcaaggcccacctggaagacctcaggctctccttggagctctcccgggtgcgcaccgacctccccctggaggtggacctcgcccaggggcgggagcccgaccgggaggggcttagggccttcctggagaggctggagttcggcagcctcctccacgagttcggcctcctggaggcccccgcccccctggaggaggccccctggcccccgccggaaggggccttcgtgggcttcgtcctctcccgccccgagcccatgtgggcggagcttaaagccctggccgcctgcagggacggccgggtgcaccgggcagcagaccccttggcggggctaaaggacctcaaggaggtccggggcctcctcgccaaggacctcgccgtcttggcctcgagggaggggctagacctcgtgcccggggacgaccccatgctcctcgcctacctcctggacccctccaacaccacccccgagggggtggcgcggcgctacgggggggagtggacggaggacgccgcccaccgggccctcctctcggagaggctccatcggaacctccttaagcgcctcgagggggaggagaagctcctttggctctaccacgaggtggaaaagcccctctcccgggtcctggcccacatggaggccaccggggtacggcgggacgtggcctaccttcaggccctttccctggagcttgcggaggagatccgccgcctcgaggaggaggtcttccgcttggcgggccaccccttcaacctcaactcccgggaccagctggaaagggtgctctttgacgagcttaggcttcccgccttggggaagacgcaaaagacaggcaagcgctccaccagcgccgcggtgctggaggccctacgggaggcccaccccatcgtggagaagatcctccagcaccgggagctcaccaagctcaagaacacctacgtggaccccctcccaagcctcgtccacccgaggacgggccgcctccacacccgcttcaaccagacggccacggccacggggaggcttagtagctccgaccccaacctgcagaacatccccgtccgcacccccttgggccagaggatccgccgggccttcgtggccgaggcgggttgggcgttggtggccctggactatagccagatagagctccgcgtcctcgcccacctctccggggacgaaaacctgatcagggtcttccaggaggggaaggacatccacacccagaccgcaagctggatgttcggcgtccccccggaggccgtggaccccctgatgcgccgggcggccaagacggtgaacttcggcgtcctctacggcatgtccgcccataggctctcccaggagcttgccatcccctacgaggaggcggtggcctttatagagcgctacttccaaagcttccccaaggtgcgggcctggatagaaaagaccctggaggaggggaggaagcggggctacgtggaaaccctcttcggaagaaggcgctacgtgcccgacctcaacgcccgggtgaagagcgtcagggagtctgcggagcgcatggccttcaacatgcccgtccagggcaccgccgccgacctcatgaagctcgccatggtgaagctcttcccccgcctccgggagatgggggcccgcatgctcctccaggtccacgacgagctcctcctggaggccccccaagcgcgggccgaggaggtggcggctttggccaaggaggccatggagaaggcctatcccctcgccgtgcccctggaggtggaggtggggatgggggaggactggctttccgccaagggttaggggggccctgccgtttagaggaagttcaaggggttgtccctcagaaacgcctccaggggaacgccctctgggcctaccaggaggcctttagccccaaaggtgcgggtgaaggcttccaggccctggg

SEQ ID NO: 3633 - DNA, 3221 bp, Artificial Sequence
  Description of Artificial Sequence: Synthetic DNA sequence of Thermus thermophilus DNA Polymerase A745Y
tctagaggaagcatgagcctcaccctggcagacaaggtggtctacgaggaggagatccagaaaagccgcttcatcgccaaggcggcccccgtggcctcggaggaggaggccttggcgtttttggccgagaaccgggagcctgaggccacccacaacggccacgcctacaagatcggcctcctctaccgcttctctgacgacggggagccctcgggcaccgcaggcaggcccatcctccacgccatagaggcccagggcctggaccgggtggcggtcctggtggtgcgctacttcggcggggtgaagctcggggccggggggcttgtgcgggcctacgggggggtggcggcggaggccttaaggcgggcgcccaaggtccccttggtggagcgggtggggctcgccttcctcgtgcccttcgccgaggtgggccgggtctacgccctcctggaggcccgcgcccctgaaggccgaggagacctacaccccggaggcgtgcgcttcgccctcctcctccccaagcccgagcgggaaggtttcctcagggcgctcctggacgccacccggggacaggtggccctggagtagcatggaggcgatgcttccgctctttgaacccaaaggccgggtcctcctggtggacggccaccacctggcctaccgcaccttcttcgccctgaagggcctcaccacgagccggggcgaaccggtgcaggcggtctacggcttcgccaagagcctcctcaaggccctgaaggaggacgggtacaaggccgtcttcgtggtctttgacgccaaggccccctccttccgccacgaggcctacgaggcctacaaggcggggagggccccgacccccgaggacttcccccggcagctcgccctcatcaaggagctggtggacctcctggggtttacccgcctcgaggtccccggctacgaggcggacgacgttctcgccaccctggccaagaaggcggaaaaggaggggtacgaggtgcgcatcctcaccgccgaccgcgacctctaccaactcgtctccgaccgcgtcgccgtcctccaccccgagggccacctcatcaccccggagtggctttgggagaagtacggcctcaggccggagcagtgggtggacttccgcgccctcgtgggggacccctccgacaacctccccggggtcaagggcatcggggagaagaccgccctcaagctcctcaaggagtggggaagcctggaaaacctcctcaagaacctggaccgggtaaagccagaaaacgtccgggagaagatcaaggcccacctggaagacctcaggctctccttggagctctcccgggtgcgcaccgacctccccctggaggtggacctcgcccaggggcgggagcccgaccgggaggggcttagggccttcctggagaggctggagttcggcagcctcctccacgagttcggcctcctggaggcccccgcccccctggaggaggccccctggcccccgccggaaggggccttcgtgggcttcgtcctctcccgccccgagcccatgtgggcggagcttaaagccctggccgcctgcagggacggccgggtgcaccgggcagcagaccccttggcggggctaaaggacctcaaggaggtccggggcctcctcgccaaggacctcgccgtcttggcctcgagggaggggctagacctcgtgcccggggacgaccccatgctcctcgcctacctcctggacccctccaacaccacccccgagggggtggcgcggcgctacgggggggagtggacggaggacgccgcccaccgggccctcctctcggagaggctccatcggaacctccttaagcgcctcgagggggaggagaagctcctttggctctaccacgaggtggaaaagcccctctcccgggtcctggcccacatggaggccaccggggtacggcgggacgtggcctaccttcaggccctttccctggagcttgcggaggagatccgccgcctcgaggaggaggtcttccgcttggcgggccaccccttcaacctcaactcccgggaccagctggaaagggtgctctttgacgagcttaggcttcccgccttggggaagacgcaaaagacaggcaagcgctccaccagcgccgcggtgctggaggccctacgggaggcccaccccatcgtggagaagatcctccagcaccgggagctcaccaagctcaagaacacctacgtggaccccctcccaagcctcgtccacccgaggacgggccgcctccacacccgcttcaaccagacggccacggccacggggaggcttagtagctccgaccccaacctgcagaacatccccgtccgcacccccttgggccagaggatccgccgggccttcgtggccgaggcgggttgggcgttggtggccctggactatagccagatagagctccgcgtcctcgcccacctctccggggacgaaaacctgatcagggtcttccaggaggggaaggacatccacacccagaccgcaagctggatgttcggcgtccccccggaggccgtggaccccctgatgcgccgggcggccaagacggtgaacttcggcgtcctctacggcatgtccgcccataggctctcccaggagcttgccatcccctacgaggaggcggtggcctttatagagcgctacttccaaagcttccccaaggtgcgggcctggatagaaaagaccctggaggaggggaggaagcggggctacgtggaaaccctcttcggaagaaggcgctacgtgcccgacctcaacgcccgggtgaagagcgtcagggagtatgcggagcgcatggccttcaacatgcccgtccagggcaccgccgccgacctcatgaagctcgccatggtgaagctcttcccccgcctccgggagatgggggcccgcatgctcctccaggtccacgacgagctcctcctggaggccccccaagcgcgggccgaggaggtggcggctttggccaaggaggccatggagaaggcctatcccctcgccgtgcccctggaggtggaggtggggatgggggaggactggctttccgccaagggttaggggggccctgccgtttagaggaagttcaaggggttgtccctcagaaacgcctccaggggaacgccctctgggcctaccaggaggcctttagccccaaaggtgcgggtgaaggcttccaggccctggg

SEQ ID NO: 3634 - DNA, 3221 bp, Artificial Sequence
  Description of Artificial Sequence: Synthetic DNA sequence of Thermus thermophilus DNA Polymerase A745W
tctagaggaagcatgagcctcaccctggcagacaaggtggtctacgaggaggagatccagaaaagccgcttcatcgccaaggcggcccccgtggcctcggaggaggaggccttggcgtttttggccgagaaccgggagcctgaggccacccacaacggccacgcctacaagatcggcctcctctaccgcttctctgacgacggggagccctcgggcaccgcaggcaggcccatcctccacgccatagaggcccagggcctggaccgggtggcggtcctggtggtgcgctacttcggcggggtgaagctcggggccggggggcttgtgcgggcctacgggggggtggcggcggaggccttaaggcgggcgcccaaggtccccttggtggagcgggtggggctcgccttcctcgtgcccttcgccgaggtgggccgggtctacgccctcctggaggcccgcgcccctgaaggccgaggagacctacaccccggaggcgtgcgcttcgccctcctcctccccaagcccgagcgggaaggtttcctcagggcgctcctggacgccacccggggacaggtggccctggagtagcatggaggcgatgcttccgctctttgaacccaaaggccgggtcctcctggtggacggccaccacctggcctaccgcaccttcttcgccctgaagggcctcaccacgagccggggcgaaccggtgcaggcggtctacggcttcgccaagagcctcctcaaggccctgaaggaggacgggtacaaggccgtcttcgtggtctttgacgccaaggccccctccttccgccacgaggcctacgaggcctacaaggcggggagggccccgacccccgaggacttcccccggcagctcgccctcatcaaggagctggtggacctcctggggtttacccgcctcgaggtccccggctacgaggcggacgacgttctcgccaccctggccaagaaggcggaaaaggaggggtacgaggtgcgcatcctcaccgccgaccgcgacctctaccaactcgtctccgaccgcgtcgccgtcctccaccccgagggccacctcatcaccccggagtggctttgggagaagtacggcctcaggccggagcagtgggtggacttccgcgccctcgtgggggacccctccgacaacctccccggggtcaagggcatcggggagaagaccgccctcaagctcctcaaggagtggggaagcctggaaaacctcctcaagaacctggaccgggtaaagccagaaaacgtccgggagaagatcaaggcccacctggaagacctcaggctctccttggagctctcccgggtgcgcaccgacctccccctggaggtggacctcgcccaggggcgggagcccgaccgggaggggcttagggccttcctggagaggctggagttcggcagcctcctccacgagttcggcctcctggaggcccccgcccccctggaggaggccccctggcccccgccggaaggggccttcgtgggcttcgtcctctcccgccccgagcccatgtgggcggagcttaaagccctggccgcctgcagggacggccgggtgcaccgggcagcagaccccttggcggggctaaaggacctcaaggaggtccggggcctcctcgccaaggacctcgccgtcttggcctcgagggaggggctagacctcgtgcccggggacgaccccatgctcctcgcctacctcctggacccctccaacaccacccccgagggggtggcgcggcgctacgggggggagtggacggaggacgccgcccaccgggccctcctctcggagaggctccatcggaacctccttaagcgcctcgagggggaggagaagctcctttggctctaccacgaggtggaaaagcccctctcccgggtcctggcccacatggaggccaccggggtacggcgggacgtggcctaccttcaggccctttccctggagcttgcggaggagatccgccgcctcgaggaggaggtcttccgcttggcgggccaccccttcaacctcaactcccgggaccagctggaaagggtgctctttgacgagcttaggcttcccgccttggggaagacgcaaaagacaggcaagcgctccaccagcgccgcggtgctggaggccctacgggaggcccaccccatcgtggagaagatcctccagcaccgggagctcaccaagctcaagaacacctacgtggaccccctcccaagcctcgtccacccgaggacgggccgcctccacacccgcttcaaccagacggccacggccacggggaggcttagtagctccgaccccaacctgcagaacatccccgtccgcacccccttgggccagaggatccgccgggccttcgtggccgaggcgggttgggcgttggtggccctggactatagccagatagagctccgcgtcctcgcccacctctccggggacgaaaacctgatcagggtcttccaggaggggaaggacatccacacccagaccgcaagctggatgttcggcgtccccccggaggccgtggaccccctgatgcgccgggcggccaagacggtgaacttcggcgtcctctacggcatgtccgcccataggctctcccaggagcttgccatcccctacgaggaggcggtggcctttatagagcgctacttccaaagcttccccaaggtgcgggcctggatagaaaagaccctggaggaggggaggaagcggggctacgtggaaaccctcttcggaagaaggcgctacgtgcccgacctcaacgcccgggtgaagagcgtcagggagtgggcggagcgcatggccttcaacatgcccgtccagggcaccgccgccgacctcatgaagctcgccatggtgaagctcttcccccgcctccgggagatgggggcccgcatgctcctccaggtccacgacgagctcctcctggaggccccccaagcgcgggccgaggaggtggcggctttggccaaggaggccatggagaaggcctatcccctcgccgtgcccctggaggtggaggtggggatgggggaggactggctttccgccaagggttaggggggccctgccgtttagaggaagttcaaggggttgtccctcagaaacgcctccaggggaacgccctctgggcctaccaggaggcctttagccccaaaggtgcgggtgaaggcttccaggccctggg

SEQ ID NO: 3635 - DNA, 3221 bp, Artificial Sequence
  Description of Artificial Sequence: Synthetic DNA sequence of Thermus thermophilus DNA Polymerase A745P
tctagaggaagcatgagcctcaccctggcagacaaggtggtctacgaggaggagatccagaaaagccgcttcatcgccaaggcggcccccgtggcctcggaggaggaggccttggcgtttttggccgagaaccgggagcctgaggccacccacaacggccacgcctacaagatcggcctcctctaccgcttctctgacgacggggagccctcgggcaccgcaggcaggcccatcctccacgccatagaggcccagggcctggaccgggtggcggtcctggtggtgcgctacttcggcggggtgaagctcggggccggggggcttgtgcgggcctacgggggggtggcggcggaggccttaaggcgggcgcccaaggtccccttggtggagcgggtggggctcgccttcctcgtgcccttcgccgaggtgggccgggtctacgccctcctggaggcccgcgcccctgaaggccgaggagacctacaccccggaggcgtgcgcttcgccctcctcctccccaagcccgagcgggaaggtttcctcagggcgctcctggacgccacccggggacaggtggccctggagtagcatggaggcgatgcttccgctctttgaacccaaaggccgggtcctcctggtggacggccaccacctggcctaccgcaccttcttcgccctgaagggcctcaccacgagccggggcgaaccggtgcaggcggtctacggcttcgccaagagcctcctcaaggccctgaaggaggacgggtacaaggccgtcttcgtggtctttgacgccaaggccccctccttccgccacgaggcctacgaggcctacaaggcggggagggccccgacccccgaggacttcccccggcagctcgccctcatcaaggagctggtggacctcctggggtttacccgcctcgaggtccccggctacgaggcggacgacgttctcgccaccctggccaagaaggcggaaaaggaggggtacgaggtgcgcatcctcaccgccgaccgcgacctctaccaactcgtctccgaccgcgtcgccgtcctccaccccgagggccacctcatcaccccggagtggctttgggagaagtacggcctcaggccggagcagtgggtggacttccgcgccctcgtgggggacccctccgacaacctccccggggtcaagggcatcggggagaagaccgccctcaagctcctcaaggagtggggaagcctggaaaacctcctcaagaacctggaccgggtaaagccagaaaacgtccgggagaagatcaaggcccacctggaagacctcaggctctccttggagctctcccgggtgcgcaccgacctccccctggaggtggacctcgcccaggggcgggagcccgaccgggaggggcttagggccttcctggagaggctggagttcggcagcctcctccacgagttcggcctcctggaggcccccgcccccctggaggaggccccctggcccccgccggaaggggccttcgtgggcttcgtcctctcccgccccgagcccatgtgggcggagcttaaagccctggccgcctgcagggacggccgggtgcaccgggcagcagaccccttggcggggctaaaggacctcaaggaggtccggggcctcctcgccaaggacctcgccgtcttggcctcgagggaggggctagacctcgtgcccggggacgaccccatgctcctcgcctacctcctggacccctccaacaccacccccgagggggtggcgcggcgctacgggggggagtggacggaggacgccgcccaccgggccctcctctcggagaggctccatcggaacctccttaagcgcctcgagggggaggagaagctcctttggctctaccacgaggtggaaaagcccctctcccgggtcctggcccacatggaggccaccggggtacggcgggacgtggcctaccttcaggccctttccctggagcttgcggaggagatccgccgcctcgaggaggaggtcttccgcttggcgggccaccccttcaacctcaactcccgggaccagctggaaagggtgctctttgacgagcttaggcttcccgccttggggaagacgcaaaagacaggcaagcgctccaccagcgccgcggtgctggaggccctacgggaggcccaccccatcgtggagaagatcctccagcaccgggagctcaccaagctcaagaacacctacgtggaccccctcccaagcctcgtccacccgaggacgggccgcctccacacccgcttcaaccagacggccacggccacggggaggcttagtagctccgaccccaacctgcagaacatccccgtccgcacccccttgggccagaggatccgccgggccttcgtggccgaggcgggttgggcgttggtggccctggactatagccagatagagctccgcgtcctcgcccacctctccggggacgaaaacctgatcagggtcttccaggaggggaaggacatccacacccagaccgcaagctggatgttcggcgtccccccggaggccgtggaccccctgatgcgccgggcggccaagacggtgaacttcggcgtcctctacggcatgtccgcccataggctctcccaggagcttgccatcccctacgaggaggcggtggcctttatagagcgctacttccaaagcttccccaaggtgcgggcctggatagaaaagaccctggaggaggggaggaagcggggctacgtggaaaccctcttcggaagaaggcgctacgtgcccgacctcaacgcccgggtgaagagcgtcagggagcctgcggagcgcatggccttcaacatgcccgtccagggcaccgccgccgacctcatgaagctcgccatggtgaagctcttcccccgcctccgggagatgggggcccgcatgctcctccaggtccacgacgagctcctcctggaggccccccaagcgcgggccgaggaggtggcggctttggccaaggaggccatggagaaggcctatcccctcgccgtgcccctggaggtggaggtggggatgggggaggactggctttccgccaagggttaggggggccctgccgtttagaggaagttcaaggggttgtccctcagaaacgcctccaggggaacgccctctgggcctaccaggaggcctttagccccaaaggtgcgggtgaaggcttccaggccctggg

SEQ ID NO: 3636 - DNA, 3221 bp, Artificial Sequence
  Description of Artificial Sequence: Synthetic DNA sequence of Thermus thermophilus DNA Polymerase A745M
tctagaggaagcatgagcctcaccctggcagacaaggtggtctacgaggaggagatccagaaaagccgcttcatcgccaaggcggcccccgtggcctcggaggaggaggccttggcgtttttggccgagaaccgggagcctgaggccacccacaacggccacgcctacaagatcggcctcctctaccgcttctctgacgacggggagccctcgggcaccgcaggcaggcccatcctccacgccatagaggcccagggcctggaccgggtggcggtcctggtggtgcgctacttcggcggggtgaagctcggggccggggggcttgtgcgggcctacgggggggtggcggcggaggccttaaggcgggcgcccaaggtccccttggtggagcgggtggggctcgccttcctcgtgcccttcgccgaggtgggccgggtctacgccctcctggaggcccgcgcccctgaaggccgaggagacctacaccccggaggcgtgcgcttcgccctcctcctccccaagcccgagcgggaaggtttcctcagggcgctcctggacgccacccggggacaggtggccctggagtagcatggaggcgatgcttccgctctttgaacccaaaggccgggtcctcctggtggacggccaccacctggcctaccgcaccttcttcgccctgaagggcctcaccacgagccggggcgaaccggtgcaggcggtctacggcttcgccaagagcctcctcaaggccctgaaggaggacgggtacaaggccgtcttcgtggtctttgacgccaaggccccctccttccgccacgaggcctacgaggcctacaaggcggggagggccccgacccccgaggacttcccccggcagctcgccctcatcaaggagctggtggacctcctggggtttacccgcctcgaggtccccggctacgaggcggacgacgttctcgccaccctggccaagaaggcggaaaaggaggggtacgaggtgcgcatcctcaccgccgaccgcgacctctaccaactcgtctccgaccgcgtcgccgtcctccaccccgagggccacctcatcaccccggagtggctttgggagaagtacggcctcaggccggagcagtgggtggacttccgcgccctcgtgggggacccctccgacaacctccccggggtcaagggcatcggggagaagaccgccctcaagctcctcaaggagtggggaagcctggaaaacctcctcaagaacctggaccgggtaaagccagaaaacgtccgggagaagatcaaggcccacctggaagacctcaggctctccttggagctctcccgggtgcgcaccgacctccccctggaggtggacctcgcccaggggcgggagcccgaccgggaggggcttagggccttcctggagaggctggagttcggcagcctcctccacgagttcggcctcctggaggcccccgcccccctggaggaggccccctggcccccgccggaaggggccttcgtgggcttcgtcctctcccgccccgagcccatgtgggcggagcttaaagccctggccgcctgcagggacggccgggtgcaccgggcagcagaccccttggcggggctaaaggacctcaaggaggtccggggcctcctcgccaaggacctcgccgtcttggcctcgagggaggggctagacctcgtgcccggggacgaccccatgctcctcgcctacctcctggacccctccaacaccacccccgagggggtggcgcggcgctacgggggggagtggacggaggacgccgcccaccgggccctcctctcggagaggctccatcggaacctccttaagcgcctcgagggggaggagaagctcctttggctctaccacgaggtggaaaagcccctctcccgggtcctggcccacatggaggccaccggggtacggcgggacgtggcctaccttcaggccctttccctggagcttgcggaggagatccgccgcctcgaggaggaggtcttccgcttggcgggccaccccttcaacctcaactcccgggaccagctggaaagggtgctctttgacgagcttaggcttcccgccttggggaagacgcaaaagacaggcaagcgctccaccagcgccgcggtgctggaggccctacgggaggcccaccccatcgtggagaagatcctccagcaccgggagctcaccaagctcaagaacacctacgtggaccccctcccaagcctcgtccacccgaggacgggccgcctccacacccgcttcaaccagacggccacggccacggggaggcttagtagctccgaccccaacctgcagaacatccccgtccgcacccccttgggccagaggatccgccgggccttcgtggccgaggcgggttgggcgttggtggccctggactatagccagatagagctccgcgtcctcgcccacctctccggggacgaaaacctgatcagggtcttccaggaggggaaggacatccacacccagaccgcaagctggatgttcggcgtccccccggaggccgtggaccccctgatgcgccgggcggccaagacggtgaacttcggcgtcctctacggcatgtccgcccataggctctcccaggagcttgccatcccctacgaggaggcggtggcctttatagagcgctacttccaaagcttccccaaggtgcgggcctggatagaaaagaccctggaggaggggaggaagcggggctacgtggaaaccctcttcggaagaaggcgctacgtgcccgacctcaacgcccgggtgaagagcgtcagggagatggcggagcgcatggccttcaacatgcccgtccagggcaccgccgccgacctcatgaagctcgccatggtgaagctcttcccccgcctccgggagatgggggcccgcatgctcctccaggtccacgacgagctcctcctggaggccccccaagcgcgggccgaggaggtggcggctttggccaaggaggccatggagaaggcctatcccctcgccgtgcccctggaggtggaggtggggatgggggaggactggctttccgccaagggttaggggggccctgccgtttagaggaagttcaaggggttgtccctcagaaacgcctccaggggaacgccctctgggcctaccaggaggcctttagccccaaaggtgcgggtgaaggcttccaggccctggg

SEQ ID NO: 3637 - DNA, 3221 bp, Artificial Sequence
  Description of Artificial Sequence: Synthetic DNA sequence of Thermus thermophilus DNA Polymerase A745T
tctagaggaagcatgagcctcaccctggcagacaaggtggtctacgaggaggagatccagaaaagccgcttcatcgccaaggcggcccccgtggcctcggaggaggaggccttggcgtttttggccgagaaccgggagcctgaggccacccacaacggccacgcctacaagatcggcctcctctaccgcttctctgacgacggggagccctcgggcaccgcaggcaggcccatcctccacgccatagaggcccagggcctggaccgggtggcggtcctggtggtgcgctacttcggcggggtgaagctcggggccggggggcttgtgcgggcctacgggggggtggcggcggaggccttaaggcgggcgcccaaggtccccttggtggagcgggtggggctcgccttcctcgtgcccttcgccgaggtgggccgggtctacgccctcctggaggcccgcgcccctgaaggccgaggagacctacaccccggaggcgtgcgcttcgccctcctcctccccaagcccgagcgggaaggtttcctcagggcgctcctggacgccacccggggacaggtggccctggagtagcatggaggcgatgcttccgctctttgaacccaaaggccgggtcctcctggtggacggccaccacctggcctaccgcaccttcttcgccctgaagggcctcaccacgagccggggcgaaccggtgcaggcggtctacggcttcgccaagagcctcctcaaggccctgaaggaggacgggtacaaggccgtcttcgtggtctttgacgccaaggccccctccttccgccacgaggcctacgaggcctacaaggcggggagggccccgacccccgaggacttcccccggcagctcgccctcatcaaggagctggtggacctcctggggtttacccgcctcgaggtccccggctacgaggcggacgacgttctcgccaccctggccaagaaggcggaaaaggaggggtacgaggtgcgcatcctcaccgccgaccgcgacctctaccaactcgtctccgaccgcgtcgccgtcctccaccccgagggccacctcatcaccccggagtggctttgggagaagtacggcctcaggccggagcagtgggtggacttccgcgccctcgtgggggacccctccgacaacctccccggggtcaagggcatcggggagaagaccgccctcaagctcctcaaggagtggggaagcctggaaaacctcctcaagaacctggaccgggtaaagccagaaaacgtccgggagaagatcaaggcccacctggaagacctcaggctctccttggagctctcccgggtgcgcaccgacctccccctggaggtggacctcgcccaggggcgggagcccgaccgggaggggcttagggccttcctggagaggctggagttcggcagcctcctccacgagttcggcctcctggaggcccccgcccccctggaggaggccccctggcccccgccggaaggggccttcgtgggcttcgtcctctcccgccccgagcccatgtgggcggagcttaaagccctggccgcctgcagggacggccgggtgcaccgggcagcagaccccttggcggggctaaaggacctcaaggaggtccggggcctcctcgccaaggacctcgccgtcttggcctcgagggaggggctagacctcgtgcccggggacgaccccatgctcctcgcctacctcctggacccctccaacaccacccccgagggggtggcgcggcgctacgggggggagtggacggaggacgccgcccaccgggccctcctctcggagaggctccatcggaacctccttaagcgcctcgagggggaggagaagctcctttggctctaccacgaggtggaaaagcccctctcccgggtcctggcccacatggaggccaccggggtacggcgggacgtggcctaccttcaggccctttccctggagcttgcggaggagatccgccgcctcgaggaggaggtcttccgcttggcgggccaccccttcaacctcaactcccgggaccagctggaaagggtgctctttgacgagcttaggcttcccgccttggggaagacgcaaaagacaggcaagcgctccaccagcgccgcggtgctggaggccctacgggaggcccaccccatcgtggagaagatcctccagcaccgggagctcaccaagctcaagaacacctacgtggaccccctcccaagcctcgtccacccgaggacgggccgcctccacacccgcttcaaccagacggccacggccacggggaggcttagtagctccgaccccaacctgcagaacatccccgtccgcacccccttgggccagaggatccgccgggccttcgtggccgaggcgggttgggcgttggtggccctggactatagccagatagagctccgcgtcctcgcccacctctccggggacgaaaacctgatcagggtcttccaggaggggaaggacatccacacccagaccgcaagctggatgttcggcgtccccccggaggccgtggaccccctgatgcgccgggcggccaagacggtgaacttcggcgtcctctacggcatgtccgcccataggctctcccaggagcttgccatcccctacgaggaggcggtggcctttatagagcgctacttccaaagcttccccaaggtgcgggcctggatagaaaagaccctggaggaggggaggaagcggggctacgtggaaaccctcttcggaagaaggcgctacgtgcccgacctcaacgcccgggtgaagagcgtcagggagactgcggagcgcatggccttcaacatgcccgtccagggcaccgccgccgacctcatgaagctcgccatggtgaagctcttcccccgcctccgggagatgggggcccgcatgctcctccaggtccacgacgagctcctcctggaggccccccaagcgcgggccgaggaggtggcggctttggccaaggaggccatggagaaggcctatcccctcgccgtgcccctggaggtggaggtggggatgggggaggactggctttccgccaagggttaggggggccctgccgtttagaggaagttcaaggggttgtccctcagaaacgcctccaggggaacgccctctgggcctaccaggaggcctttagccccaaaggtgcgggtgaaggcttccaggccctggg

SEQ ID NO: 3638 - DNA, 3221 bp, Artificial Sequence
  Description of Artificial Sequence: Synthetic DNA sequence of Thermus thermophilus DNA Polymerase A745N
tctagaggaagcatgagcctcaccctggcagacaaggtggtctacgaggaggagatccagaaaagccgcttcatcgccaaggcggcccccgtggcctcggaggaggaggccttggcgtttttggccgagaaccgggagcctgaggccacccacaacggccacgcctacaagatcggcctcctctaccgcttctctgacgacggggagccctcgggcaccgcaggcaggcccatcctccacgccatagaggcccagggcctggaccgggtggcggtcctggtggtgcgctacttcggcggggtgaagctcggggccggggggcttgtgcgggcctacgggggggtggcggcggaggccttaaggcgggcgcccaaggtccccttggtggagcgggtggggctcgccttcctcgtgcccttcgccgaggtgggccgggtctacgccctcctggaggcccgcgcccctgaaggccgaggagacctacaccccggaggcgtgcgcttcgccctcctcctccccaagcccgagcgggaaggtttcctcagggcgctcctggacgccacccggggacaggtggccctggagtagcatggaggcgatgcttccgctctttgaacccaaaggccgggtcctcctggtggacggccaccacctggcctaccgcaccttcttcgccctgaagggcctcaccacgagccggggcgaaccggtgcaggcggtctacggcttcgccaagagcctcctcaaggccctgaaggaggacgggtacaaggccgtcttcgtggtctttgacgccaaggccccctccttccgccacgaggcctacgaggcctacaaggcggggagggccccgacccccgaggacttcccccggcagctcgccctcatcaaggagctggtggacctcctggggtttacccgcctcgaggtccccggctacgaggcggacgacgttctcgccaccctggccaagaaggcggaaaaggaggggtacgaggtgcgcatcctcaccgccgaccgcgacctctaccaactcgtctccgaccgcgtcgccgtcctccaccccgagggccacctcatcaccccggagtggctttgggagaagtacggcctcaggccggagcagtgggtggacttccgcgccctcgtgggggacccctccgacaacctccccggggtcaagggcatcggggagaagaccgccctcaagctcctcaaggagtggggaagcctggaaaacctcctcaagaacctggaccgggtaaagccagaaaacgtccgggagaagatcaaggcccacctggaagacctcaggctctccttggagctctcccgggtgcgcaccgacctccccctggaggtggacctcgcccaggggcgggagcccgaccgggaggggcttagggccttcctggagaggctggagttcggcagcctcctccacgagttcggcctcctggaggcccccgcccccctggaggaggccccctggcccccgccggaaggggccttcgtgggcttcgtcctctcccgccccgagcccatgtgggcggagcttaaagccctggccgcctgcagggacggccgggtgcaccgggcagcagaccccttggcggggctaaaggacctcaaggaggtccggggcctcctcgccaaggacctcgccgtcttggcctcgagggaggggctagacctcgtgcccggggacgaccccatgctcctcgcctacctcctggacccctccaacaccacccccgagggggtggcgcggcgctacgggggggagtggacggaggacgccgcccaccgggccctcctctcggagaggctccatcggaacctccttaagcgcctcgagggggaggagaagctcctttggctctaccacgaggtggaaaagcccctctcccgggtcctggcccacatggaggccaccggggtacggcgggacgtggcctaccttcaggccctttccctggagcttgcggaggagatccgccgcctcgaggaggaggtcttccgcttggcgggccaccccttcaacctcaactcccgggaccagctggaaagggtgctctttgacgagcttaggcttcccgccttggggaagacgcaaaagacaggcaagcgctccaccagcgccgcggtgctggaggccctacgggaggcccaccccatcgtggagaagatcctccagcaccgggagctcaccaagctcaagaacacctacgtggaccccctcccaagcctcgtccacccgaggacgggccgcctccacacccgcttcaaccagacggccacggccacggggaggcttagtagctccgaccccaacctgcagaacatccccgtccgcacccccttgggccagaggatccgccgggccttcgtggccgaggcgggttgggcgttggtggccctggactatagccagatagagctccgcgtcctcgcccacctctccggggacgaaaacctgatcagggtcttccaggaggggaaggacatccacacccagaccgcaagctggatgttcggcgtccccccggaggccgtggaccccctgatgcgccgggcggccaagacggtgaacttcggcgtcctctacggcatgtccgcccataggctctcccaggagcttgccatcccctacgaggaggcggtggcctttatagagcgctacttccaaagcttccccaaggtgcgggcctggatagaaaagaccctggaggaggggaggaagcggggctacgtggaaaccctcttcggaagaaggcgctacgtgcccgacctcaacgcccgggtgaagagcgtcagggagaatgcggagcgcatggccttcaacatgcccgtccagggcaccgccgccgacctcatgaagctcgccatggtgaagctcttcccccgcctccgggagatgggggcccgcatgctcctccaggtccacgacgagctcctcctggaggccccccaagcgcgggccgaggaggtggcggctttggccaaggaggccatggagaaggcctatcccctcgccgtgcccctggaggtggaggtggggatgggggaggactggctttccgccaagggttaggggggccctgccgtttagaggaagttcaaggggttgtccctcagaaacgcctccaggggaacgccctctgggcctaccaggaggcctttagccccaaaggtgcgggtgaaggcttccaggccctggg

SEQ ID NO: 3639 - DNA, 3210 bp, Artificial Sequence
  Description of Artificial Sequence: Synthetic DNA sequence of Thermus thermophilus DNA Polymerase A745V
tctagaggaagcatgagcctcaccctggcagacaaggtggtctacgaggaggagatccagaaaagccgcttcatcgccaaggcggcccccgtggcctcggaggaggaggccttggcgtttttggccgagaaccgggagcctgaggccacccacaacggccacgcctacaagatcggcctcctctaccgcttctctgacgacggggagccctcgggcaccgcaggcaggcccatcctccacgccatagaggcccagggcctggaccgggtggcggtcctggtggtgcgctacttcggcggggtgaagctcggggccggggggcttgtgcgggcctacgggggggtggcggcggaggccttaaggcgggcgcccaaggtccccttggtggagcgggtggggctcgccttcctcgtgcccttcgccgaggtgggccgggtctacgccctcctggaggcccgcgcccctgaaggccgaggagacctacaccccggaggcgtgcgcttcgccctcctcctccccaagcccgagcgggaaggtttcctcagggcgctcctggacgccacccggggacaggtggccctggagtagcatggaggcgatgcttccgctctttgaacccaaaggccgggtcctcctggtggacggccaccacctggcctaccgcaccttcttcgccctgaagggcctcaccacgagccggggcgaaccggtgcaggcggtctacggcttcgccaagagcctcctcaaggccctgaaggaggacgggtacaaggccgtcttcgtggtctttgacgccaaggccccctccttccgccacgaggcctacgaggcctacaaggcggggagggccccgacccccgaggacttcccccggcagctcgccctcatcaaggagctggtggacctcctggggtttacccgcctcgaggtccccggctacgaggcggacgacgttctcgccaccctggccaagaaggcggaaaaggaggggtacgaggtgcgcatcctcaccgccgaccgcgacctctaccaactcgtctccgaccgcgtcgccgtcctccaccccgagggccacctcatcaccccggagtggctttgggagaagtacggcctcaggccggagcagtgggtggacttccgcgccctcgtgggggacccctccgacaacctccccggggtcaagggcatcggggagaagaccgccctcaagctcctcaaggagtggggaagcctggaaaacctcctcaagaacctggaccgggtaaagccagaaaacgtccgggagaagatcaaggcccacctggaagacctcaggctctccttggagctctcccgggtgcgcaccgacctccccctggaggtggacctcgcccaggggcgggagcccgaccgggaggggcttagggccttcctggagaggctggagttcggcagcctcctccacgagttcggcctcctggaggcccccgcccccctggaggaggccccctggcccccgccggaaggggccttcgtgggcttcgtcctctcccgccccgagcccatgtgggcggagcttaaagccctggccgcctgcagggacggccgggtgcaccgggcagcagaccccttggcggggctaaaggacctcaaggaggtccggggcctcctcgccaaggacctcgccgtcttggcctcgagggaggggctagacctcgtgcccggggacgaccccatgctcctcgcctacctcctggacccctccaacaccacccccgagggggtggcgcggcgctacgggggggagtggacggaggacgccgcccaccgggccctcctctcggagaggctccatcggaacctccttaagcgcctcgagggggaggagaagctcctttggctctaccacgaggtggaaaagcccctctcccgggtcctggcccacatggaggccaccggggtacggcgggacgtggcctaccttcaggccctttccctggagcttgcggaggagatccgccgcctcgaggaggaggtcttccgcttggcgggccaccccttcaacctcaactcccgggaccagctggaaagggtgctctttgacgagcttaggcttcccgccttggggaagacgcaaaagacaggcaagcgctccaccagcgccgcggtgctggaggccctacgggaggcccaccccatcgtggagaagatcctccagcaccgggagctcaccaagctcaagaacacctacgtggaccccctcccaagcctcgtccacccgaggacgggccgcctccacacccgcttcaaccagacggccacggccacggggaggcttagtagctccgaccccaacctgcagaacatccccgtccgcacccccttgggccagaggatccgccgggccttcgtggccgaggcgggttgggcgttggtggccctggactatagccagatagagctccgcgtcctcgcccacctctccggggacgaaaacctgatcagggtcttccaggaggggaaggacatccacacccagaccgcaagctggatgttcggcgtccccccggaggccgtggaccccctgatgcgccgggcggccaagacggtgaacttcggcgtcctctacggcatgtccgcccataggctctcccaggagcttgccatcccctacgaggaggcggtggcctttatagagcgctacttccaaagcttccccaaggtgcgggcctggatagaaaagaccctggaggaggggaggaagcggggctacgtggaaaccctcttcggaagaaggcgctacgtgcccgacctcaacgcccgggtgaagagcgtcagggaggtcgcggagcgcatggccttcaacatgcccgtccagggcaccgccgccgacctcatgaagctcgccatggtgaagctcttcccccgcctccgggagatgggggcccgcatgctcctccaggtccacgacgagctcctcctggaggccccccaagcgcgggccgaggaggtggcggctttggccaaggaggccatggagaaggcctatcccctcgccgtgcccctggaggtggaggtggggatgggggaggactggctttccgccaagggttaggggggccctgccgtttagaggaagttcaaggggttgtccctcagaaacgcctccaggggaacgccctctgggcctaccaggaggcctttagccccaaaggtgcgggtgaaggcttc

SEQ ID NO: 3640 - protein, 865 aa, Artificial Sequence
  Description of Artificial Sequence: Synthetic polypeptide aligned with a reference DNA polymerase
  MOD_RES (864)..(865): Any naturally occurring amino acid
MKYLLPTAAAGLLLLAAQPAMAMKLVLIDGNSLAYRAFFALPLTTSTGIPTNAVYGFANMLLKYLEEEKPDYVAVAFDKKAPTFRHSEYEEYKAGRQPMPDELQEQIPYVRELLRALNPVLELEGYEADDIIGTLAKRAEAEGMEVVIITGDRDLLQLVSDNVIVKITKKGITTEELYTPEAVKEKYGVTPHQIVDLKGLMGDASDNIPGVPGIGEKTAIKLLEEYGTLENLLQNLDEIKGKLKEKLEAHKDMAFLSKRLATIIRDLPIEVDLEELKRKEWDKEKLLAILLQLEFKSLIKRLGFSEEIERQKQLPEFSVSDIKEKEYLLSDEEGLFYDGIAGYFYIRQTSALTSDKEALKELLADESIQKVGHDLKNILVKLDFKGIELLGNCFDTMLAAYLLDPTRSSYDLETLAKKYLNTDVASGKGIENRLAGYAAVLLRNLWDELSKLIDENELEYLLEEIEMPLVPVLAEMEKIGFKVDKETLQELSEEIEEKLLKLESEIYQLAGEEFNINSPKQLSEILFEKLKLPVVKKTKTGYSTDAEVLEELYPYHDIVPLILEYEQLTKLKSTYIDGLLKLINPVTGRVHTNFNQTGTATGRLSSTEPNLQNIPVRYEEGRLIRKAFVPEEGYLLVAADYSQIELRVLAHISGDENLIEAFKNNLDIHTQTAAEIFGVDEEEVTPEMRRQAKAVNFGIVYGISDYGLSRDLKISRKEAAEFINRYFEKYPGVKEYIDNIVKFARENGYVTTLFNRRRYIPDIKSRNKNVRSFAERIAMNTPIQGSAADIIKIAMIKVYKRLKEENLKSRLILQVHDELVIEVPKEEKEIVKELVKEVMENAVLLKVPLVVEVGIGSNWYEAKXX

SEQ ID NO: 3641 - protein, 19 aa, Artificial Sequence
  Description of Artificial Sequence: Synthetic Q-helice sequence
  MOD_RES (3)..(10): Any naturally occurring amino acid
  MOD_RES (12)..(14): Any naturally occurring amino acid
RYXXXXXXXXFXXXSFAER

SEQ ID NO: 3642 - protein, 873 aa, Artificial Sequence
  Description of Artificial Sequence: Synthetic polypeptide aligned with a reference DNA polymerase
MAYKFLIIDGSSLMYRAYYALPMLTTSEGLPTNALYGFTMMLIKLIEEEKPDYIAIAFDKKAPTFRHKEYQDYKATRQAMPEELAEQVDYLKEIIDGFNIKTLELEGYEADDIIGTISKLAEEKGMEVLVVTGDRDALQLVSDKVKIKISKKGITQMEEFDEKAILERYGITPQQFIDLKGLMGDKSDNIPGVPNIGEKTAIKLLKDFGTIENLIQNLSQLKGKIKENIENNKELAIMSKRLATIKRDIPIEIDFEEYKVKKFNEEKLLELFNKLEFFSLIDNIKKESSIEIVDNHKVEKWSKVDIKELVTLLQDNRNIAFYPLIYEGEIKKIAFSFGKDTVYIDVFQTEDLKEIFEKEDFEFTTHEIKDFLVRLSYKGIECKSKYIDTAVMAYLLNPSESNYDLDRVLKKYLKVDVPSYEGIFGKGRDKKKIEEIDENILADYICSRCVYLFDLKEKLMNFIEEMDMKKLLLEIEMPLVEVLKSMEVSGFTLDKEVLKELSQKIDDRIGEILDKIYKEAGYQFNVNSPKQLSEFLFEKLNLPVIKKTKTGYSTDSEVLEQLVPYNDIVSDIIEYRQLTKLKSTYIDGFLPLMDENNRVHSNFKQMVTATGRISSTEPNLQNIPIREEFGRQIRRAFIPRSRDGYIVSADYSQIELRVLAHVSGDEKLIESFMNNEDIHLRTASEVFKVPMEKVTPEMRRAAKAVNFGIIYGISDYGLSRDLKISRKEAKEYINNYFERYKGVKDYIEKIVRFAKENGYVTTIMNRRRYIPEINSRNFTQRSQAERLAMNAPIQGSAADIIKMAMVKVYNDLKKLKLKSKLILQVHDELVVDTYKDEVDIIKKILKENMENVVQLKVPLVVEIGVGPNWFLAK
